(19) United States
(12) Patent Application Publication
(10) Pub. No.: US 2023/0016656 A1
(43) Pub. Date: Jan. 19, 2023

(54) NOVEL CRISPR DNA TARGETING ENZYMES AND SYSTEMS

(71) Applicant: ARBOR BIOTECHNOLOGIES, INC., Cambridge, MA (US)

(72) Inventors: David A. Scott, Cambridge, MA (US); David R. Cheng, Boston, MA (US); Winston X. Yan, Boston, MA (US); Tia M. Ditommaso, Waltham, MA (US)

(21) Appl. No.: 17/638,065

(22) PCT Filed: Aug. 26, 2020
(86) PCT No.: PCT/US2020/048037

§ 371 Date: Feb. 24, 2022

Related U.S. Application Data
(60) Provisional application No. 62/896,277, filed on Sep. 5, 2019.
(60) Provisional application No. 62/893,064, filed on Aug. 28, 2019.
(60) Provisional application No. 62/893,059, filed on Aug. 28, 2019.
(60) Provisional application No. 62/892,358, filed on Aug. 27, 2019.
(60) Provisional application No. 62/892,382, filed on Aug. 27, 2019.
(60) Provisional application No. 62/892,390, filed on Aug. 27, 2019.
(60) Provisional application No. 62/892,446, filed on Aug. 27, 2019.
(60) Provisional application No. 62/892,434, filed on Aug. 27, 2019.

(51) Int. Cl. C12N 9/22; C12N 15/11; C12N 15/90

(52) U.S. Cl. CPC C12N 9/22; C12N 15/11; C12N 15/907; C12N 2310/20

(57) ABSTRACT

The disclosure describes novel systems, methods, and compositions for the manipulation of nucleic acids in a targeted fashion. The disclosure describes non-naturally occurring, engineered CRISPR systems, components, and methods for targeted modification of nucleic acids. Each system includes one or more protein components and one or more nucleic acid components that together target nucleic acids.

### RELATED APPLICATIONS

[0001] This application claims priority to U.S. Provisional Application 62/892,358 filed on Aug. 27, 2019, U.S. Provisional Application 62/892,382 filed on Aug. 27, 2019, U.S. Provisional Application 62/892,390 filed on Aug. 27, 2019, U.S. Provisional Application filed on 62/892,446 filed on Aug. 27, 2019, U.S. Provisional Application 62/892,434 filed on Aug. 27, 2019, U.S. Provisional Application 62/893,064 filed on Aug. 28, 2019, U.S. Provisional Application 62/893,059 filed on Aug. 28, 2019, and U.S. Provisional Application 62/896,277 filed on Sep. 5, 2019, the entire contents of each of which are hereby incorporated by reference.

### SEQUENCE LISTING

[0002] The instant application contains a Sequence Listing which has been submitted electronically in ASCII format and is hereby incorporated by reference in its entirety. Said ASCII copy, created on Aug. 26, 2020 is named A2186-7018WO_SL.txt and is 1,301,348 bytes in size.

### FIELD OF THE INVENTION

[0003] The present disclosure relates to systems and methods for genome editing and modulation of gene expression using novel Clustered Regularly Interspaced Short Palindromic Repeats (CRISPR) and CRISPR-associated (Cas) genes.

### BACKGROUND

[0004] Recent advances in genome sequencing technologies and analyses have yielded significant insight into the genetic underpinnings of biological activities in many diverse areas of nature, ranging from prokaryotic biosynthetic pathways to human pathologies. To fully understand and evaluate the vast quantities of information yielded, equivalent increases in the scale, efficacy, and ease of sequence technologies for genome and epigenome manipulation are needed. These novel technologies will accelerate the development of novel applications in numerous areas, including biotechnology, agriculture, and human therapeutics.

[0005] Clustered Regularly Interspaced Short Palindromic Repeats (CRISPR) and CRISPR-associated (Cas) genes, collectively known as CRISPR-Cas or CRISPR/Cas systems, are adaptive immune systems in archaea and bacteria that defend particular species against foreign genetic elements. CRISPR-Cas systems comprise an extremely diverse group of proteins effectors, non-coding elements, and loci architectures, some examples of which have been engineered and adapted to produce important biotechnological advances.

[0006] The components of the system involved in host defense include one or more effector proteins capable of modifying a nucleic acid and an RNA guide element that is responsible for targeting the effector protein(s) to a specific sequence on a phage nucleic acid. The RNA guide is composed of a CRISPR RNA (crRNA) and may require an additional trans-activating RNA (tracrRNA) to enable targeted nucleic acid manipulation by the effector protein(s). The crRNA consists of a direct repeat responsible for protein binding to the crRNA and a spacer sequence that is complementary to the desired nucleic acid target sequence. CRISPR systems can be reprogrammed to target alternative DNA or RNA targets by modifying the spacer sequence of the crRNA.

[0007] CRISPR-Cas systems can be broadly classified into two classes: Class 1 systems are composed of multiple effector proteins that together form a complex around a crRNA, and Class 2 systems consist of one effector protein that complexes with the RNA guide to target nucleic acid substrates. The single-subunit effector composition of the Class 2 systems provides a simpler component set for engineering and application translation and have thus far been an important source of programmable effectors. Nevertheless, there remains a need for additional programmable effectors and systems for modifying nucleic acids and polynucleotides (i.e., DNA, RNA, or any hybrid, derivative, or modification) beyond the current CRISPR-Cas systems, such as smaller effectors and/or effectors having unique PAM sequence requirements, that enable novel applications through their unique properties.

### SUMMARY

[0008] This disclosure provides non-naturally-occurring, engineered systems and compositions for novel single-effector Class 2 CRISPR-Cas systems, which were first identified computationally from genomic databases and subsequently engineered and experimentally validated. In particular, identification of the components of these CRISPR-Cas systems allows for their use in non-natural environments, e.g., in bacteria other than those in which the systems were initially discovered or in eukaryotic cells, such as mammalian cells. These new effectors are divergent in sequence and function compared to orthologs and homologs of existing Class 2 CRISPR effectors.

[0009] In one aspect, the disclosure provides engineered, non-naturally occurring Clustered Regularly Interspaced Short Palindromic Repeat (CRISPR)—Cas systems of CLUST.133120 including: a CRISPR-associated protein, wherein the CRISPR-associated protein includes an amino acid sequence that is at least 80% (e.g., 81%, 82%, 83%, 84%, 85%, 86%, 87%, 88%, 89%, 90%, 91%, 92%, 93%, 94%, 95%, 96%, 97%, 98%, 99% or 100%) identical to an amino acid sequence set forth in any one of SEQ ID NOs: 1-50; and an RNA guide including a direct repeat sequence and a spacer sequence capable of hybridizing to a target nucleic acid; wherein the CRISPR-associated protein is capable of binding to the RNA guide and of modifying the target nucleic acid sequence complementary to the spacer sequence. In one aspect, the disclosure provides engineered, non-naturally occurring Clustered Regularly Interspaced Short Palindromic Repeat (CRISPR)—Cas systems of CLUST.133120 including: a CRISPR-associated protein or a nucleic acid encoding the CRISPR-associated protein, wherein the CRISPR-associated protein includes an amino acid sequence that is at least 80% (e.g., 81%, 82%, 83%, 84%, 85%, 86%, 87%, 88%, 89%, 90%, 91%, 92%, 93%, 94%, 95%, 96%, 97%, 98%, 99% or 100%) identical to an amino acid sequence set forth in any one of SEQ ID NOs: 1-50; and an RNA guide including a direct repeat sequence and a spacer sequence capable of hybridizing to a target nucleic acid, or a nucleic acid encoding the RNA guide; wherein the CRISPR-associated protein is capable of binding to the RNA guide and of modifying the target nucleic acid sequence complementary to the spacer sequence.

[0010] In some embodiments of any of the systems described herein, the direct repeat sequence includes a nucleotide sequence that is at least 80% (e.g., 81%, 82%, 83%, 84%, 85%, 86%, 87%, 88%, 89%, 90%, 91%, 92%, 93%, 94%, 95%, 96%, 97%, 98%, 99% or 100%) identical to a nucleotide sequence set forth in any one of SEQ ID NOs: 51-72, 85-87, 95-100, or 900-915.

[0011] In some embodiments, the CRISPR-associated protein comprises an amino acid sequence that is at least 80% (e.g., 81%, 82%, 83%, 84%, 85%, 86%, 87%, 88%, 89%, 90%, 91%, 92%, 93%, 94%, 95%, 96%, 97%, 98%, 99% or 100%) identical to the amino acid sequence of SEQ ID NO: 1, and the direct repeat sequence comprises a nucleotide sequence that is at least 80% (e.g., 81%, 82%, 83%, 84%, 85%, 86%, 87%, 88%, 89%, 90%, 91%, 92%, 93%, 94%, 95%, 96%, 97%, 98%, 99% or 100%) identical to the nucleotide sequence of SEQ ID NO: 51, 95, or 85. In some embodiments, the CRISPR-associated protein comprises an amino acid sequence that is at least 80% (e.g., 81%, 82%, 83%, 84%, 85%, 86%, 87%, 88%, 89%, 90%, 91%, 92%, 93%, 94%, 95%, 96%, 97%, 98%, 99% or 100%) identical to an amino acid sequence of Table 3 and the direct repeat sequence comprises a nucleotide sequence that is at least 80% (e.g., 81%, 82%, 83%, 84%, 85%, 86%, 87%, 88%, 89%, 90%, 91%, 92%, 93%, 94%, 95%, 96%, 97%, 98%, 99% or 100%) identical to a corresponding direct repeat nucleotide sequence listed in Table 4 (e.g., the first or second direct repeat nucleotide sequence of the corresponding row in Table 4), or to a corresponding direct repeat nucleotide sequence listed in Table 32 (e.g., a pre-crRNA direct repeat sequence or a mature crRNA direct repeat sequence of Table 32).

[0012] In some embodiments of any of the systems described herein, the CRISPR-associated protein is a protein having at least 80% (e.g., 81%, 82%, 83%, 84%, 85%, 86%, 87%, 88%, 89%, 90%, 91%, 92%, 93%, 94%, 95%, 96%, 97%, 98%, 99% or 100%) identity to an amino acid sequence set forth in SEQ ID NO: 1 (CLUST.133120 3300027740) or SEQ ID NO: 2 (CLUST.133120 3300017971).

[0013] In some embodiments of any of the systems described herein, the CRISPR-associated protein is a protein having at least 80% (e.g., 81%, 82%, 83%, 84%, 85%, 86%, 87%, 88%, 89%, 90%, 91%, 92%, 93%, 94%, 95%, 96%, 97%, 98%, 99% or 100%) identity to an amino acid sequence set forth in SEQ ID NO: 1-50 (CLUST.133120).

[0014] In some embodiments of any of the systems described herein, the CRISPR-associated protein is capable of recognizing a protospacer adjacent motif (PAM), wherein the PAM includes a nucleic acid sequence, including a nucleic acid sequence set forth as 5′-TTN-3′ or 5′-TN-3′.

[0015] In some embodiments, the CRISPR-associated protein comprises an amino acid sequence that is at least 80% (e.g., 81%, 82%, 83%, 84%, 85%, 86%, 87%, 88%, 89%, 90%, 91%, 92%, 93%, 94%, 95%, 96%, 97%, 98%, 99% or 100%) identical to the amino acid sequence of SEQ ID NO:1, and the PAM sequence comprises a nucleic acid sequence set forth as 5′-TTN-3′. In some embodiments, the CRISPR-associated protein comprises an amino acid sequence that is at least 80% (e.g., 81%, 82%, 83%, 84%, 85%, 86%, 87%, 88%, 89%, 90%, 91%, 92%, 93%, 94%, 95%, 96%, 97%, 98%, 99% or 100%) identical to the amino acid sequence of SEQ ID NO: 2, and the PAM sequence comprises a nucleic acid sequence set forth as 5′-TN-3′.

[0016] In some embodiments of any of the systems described herein, the spacer sequence of the RNA guide includes between about 15 nucleotides to about 55 nucleotides. In some embodiments of any of the systems described herein, the spacer sequence of the RNA guide includes between 20 and 35 nucleotides.

[0017] In another aspect, the disclosure provides a cell (e.g., a genetically modified cell), wherein the cell includes: a CRISPR-associated protein, wherein the CRISPR-associated protein includes an amino acid sequence that is at least 80% (e.g., 81%, 82%, 83%, 84%, 85%, 86%, 87%, 88%, 89%, 90%, 91%, 92%, 93%, 94%, 95%, 96%, 97%, 98%, 99% or 100%) identical to an amino acid sequence set forth in any one of SEQ ID NOs: 1-50; and an RNA guide including a direct repeat sequence and a spacer sequence capable of hybridizing to a target nucleic acid. In another aspect, the disclosure provides a cell (e.g., a genetically modified cell), wherein the cell includes: a CRISPR-associated protein or a nucleic acid encoding the CRISPR-associated protein, wherein the CRISPR-associated protein includes an amino acid sequence that is at least 80% (e.g., 81%, 82%, 83%, 84%, 85%, 86%, 87%, 88%, 89%, 90%, 91%, 92%, 93%, 94%, 95%, 96%, 97%, 98%, 99% or 100%) identical to an amino acid sequence set forth in any one of SEQ ID NOs: 1-50; and an RNA guide including a direct repeat sequence and a spacer sequence capable of hybridizing to a target nucleic acid, or a nucleic acid encoding the RNA guide.

[0018] In some embodiments of any of the cells described herein, the CRISPR-associated protein is a protein having at least 80% (e.g., 81%, 82%, 83%, 84%, 85%, 86%, 87%, 88%, 89%, 90%, 91%, 92%, 93%, 94%, 95%, 96%, 97%, 98%, 99% or 100%) identity to an amino acid sequence set forth in SEQ ID NO: 1 or SEQ ID NO: 2.

[0019] In some embodiments of any of the cells described herein, the CRISPR-associated protein is a protein having at least 80% (e.g., 81%, 82%, 83%, 84%, 85%, 86%, 87%, 88%, 89%, 90%, 91%, 92%, 93%, 94%, 95%, 96%, 97%, 98%, 99% or 100%) identity to an amino acid sequence set forth in SEQ ID NO: 1-50.

[0020] In some embodiments of any of the cells described herein, the CRISPR-associated protein is capable of recognizing a PAM sequence including a nucleic acid sequence set forth as 5′-TTN-3′ or 5′-TN-3′.

[0021] In some embodiments of any of the cells described herein, the direct repeat sequence includes a nucleotide sequence that is at least 80% (e.g., 81%, 82%, 83%, 84%, 85%, 86%, 87%, 88%, 89%, 90%, 91%, 92%, 93%, 94%, 95%, 96%, 97%, 98%, 99% or 100%) identical to a nucleotide sequence set forth in any one of SEQ ID NOs: 51-72, 85-87, 95-100, or 900-915.

[0022] In some embodiments of any of the cells described herein, the spacer sequence includes between about 15 nucleotides to about 55 nucleotides. In some embodiments of any of the cells described herein, the spacer sequence includes between 20 and 35 nucleotides.

[0023] In another aspect, the disclosure provides methods of modifying a target nucleic acid, the method including delivering to the target nucleic acid an engineered, non-naturally occurring CRISPR-Cas system including: a CRISPR-associated protein, wherein the CRISPR-associated protein includes an amino acid sequence that is at least 80% (e.g., 81%, 82%, 83%, 84%, 85%, 86%, 87%, 88%, 89%, 90%, 91%, 92%, 93%, 94%, 95%, 96%, 97%, 98%, 99% or 100%) identical to an amino acid sequence set forth in any one of SEQ ID NOs: 1-50; and an RNA guide including a direct repeat sequence and a spacer sequence capable of hybridizing to the target nucleic acid; wherein the CRISPR-associated protein is capable of binding to the RNA guide; and wherein recognition of the target nucleic acid by the CRISPR-associated protein and RNA guide results in a modification of the target nucleic acid. In another aspect, the disclosure provides methods of modifying a target nucleic acid, the method including delivering to the target nucleic acid an engineered, non-naturally occurring CRISPR-Cas system including: a CRISPR-associated protein or a nucleic acid encoding the CRISPR-associated protein, wherein the CRISPR-associated protein includes an amino acid sequence that is at least 80% (e.g., 81%, 82%, 83%, 84%, 85%, 86%, 87%, 88%, 89%, 90%, 91%, 92%, 93%, 94%, 95%, 96%, 97%, 98%, 99% or 100%) identical to an amino acid sequence set forth in any one of SEQ ID NOs: 1-50; and an RNA guide including a direct repeat sequence and a spacer sequence capable of hybridizing to the target nucleic acid, or a nucleic acid encoding the RNA guide; wherein the CRISPR-associated protein is capable of binding to the RNA guide; and wherein recognition of the target nucleic acid by the CRISPR-associated protein and RNA guide results in a modification of the target nucleic acid.

[0024] In some embodiments of any of the methods described herein, the CRISPR-associated protein is a protein having at least 80% (e.g., 81%, 82%, 83%, 84%, 85%, 86%, 87%, 88%, 89%, 90%, 91%, 92%, 93%, 94%, 95%, 96%, 97%, 98%, 99% or 100%) identity to an amino acid sequence set forth in SEQ ID NO: 1 or SEQ ID NO: 2.

[0025] In some embodiments of any of the methods described herein, the CRISPR-associated protein is a protein having at least 80% (e.g., 81%, 82%, 83%, 84%, 85%, 86%, 87%, 88%, 89%, 90%, 91%, 92%, 93%, 94%, 95%, 96%, 97%, 98%, 99% or 100%) identity to an amino acid sequence set forth in SEQ ID NO: 1-50 (CLUST.133120).

[0026] In some embodiments of any of the methods described herein, the CRISPR-associated protein is capable of recognizing a PAM sequence including a nucleic acid sequence set forth as 5′-TTN-3′ or 5′-TN-3′.

[0027] In some embodiments of any of the methods described herein, the direct repeat sequence includes a nucleotide sequence that is at least 80% (e.g., 81%, 82%, 83%, 84%, 85%, 86%, 87%, 88%, 89%, 90%, 91%, 92%, 93%, 94%, 95%, 96%, 97%, 98%, 99% or 100%) identical to a nucleotide sequence set forth in any one of SEQ ID NOs: 51-72, 85-87, 95-100, or 900-915.

[0028] In some embodiments of any of the methods described herein, the spacer sequence includes between about 15 nucleotides to about 55 nucleotides. In some embodiments of any of the methods described herein, the spacer sequence includes between 20 and 35 nucleotides.

[0029] In one aspect, the disclosure provides engineered, non-naturally occurring Clustered Regularly Interspaced Short Palindromic Repeat (CRISPR)—Cas systems of CLUST.099129 including: a CRISPR-associated protein, wherein the CRISPR-associated protein includes an amino acid sequence that is at least 80% (e.g., 81%, 82%, 83%, 84%, 85%, 86%, 87%, 88%, 89%, 90%, 91%, 92%, 93%, 94%, 95%, 96%, 97%, 98%, 99% or 100%) identical to an amino acid sequence set forth in any one of SEQ ID NOs: 101-145; and an RNA guide including a direct repeat sequence and a spacer sequence capable of hybridizing to a target nucleic acid; wherein the CRISPR-associated protein is capable of binding to the RNA guide and of modifying the target nucleic acid sequence complementary to the spacer sequence. In one aspect, the disclosure provides engineered, non-naturally occurring Clustered Regularly Interspaced Short Palindromic Repeat (CRISPR)—Cas systems of CLUST.099129 including: a CRISPR-associated protein or a nucleic acid encoding the CRISPR-associated protein, wherein the CRISPR-associated protein includes an amino acid sequence that is at least 80% (e.g., 81%, 82%, 83%, 84%, 85%, 86%, 87%, 88%, 89%, 90%, 91%, 92%, 93%, 94%, 95%, 96%, 97%, 98%, 99% or 100%) identical to an amino acid sequence set forth in any one of SEQ ID NOs: 101-145; and an RNA guide including a direct repeat sequence and a spacer sequence capable of hybridizing to a target nucleic acid, or a nucleic acid encoding the RNA guide; wherein the CRISPR-associated protein is capable of binding to the RNA guide and of modifying the target nucleic acid sequence complementary to the spacer sequence.

[0030] In some embodiments of any of the systems described herein, the direct repeat sequence includes a nucleotide sequence that is at least 80% (e.g., 81%, 82%, 83%, 84%, 85%, 86%, 87%, 88%, 89%, 90%, 91%, 92%, 93%, 94%, 95%, 96%, 97%, 98%, 99% or 100%) identical to a nucleotide sequence set forth in any one of SEQ ID NOs: 146-162, 180-183, or 200-215.

[0031] In some embodiments, the CRISPR-associated protein comprises an amino acid sequence that is at least 80% (e.g., 81%, 82%, 83%, 84%, 85%, 86%, 87%, 88%, 89%, 90%, 91%, 92%, 93%, 94%, 95%, 96%, 97%, 98%, 99% or 100%) identical to the amino acid sequence of SEQ ID NO: 101, and the direct repeat sequence comprises a nucleotide sequence that is at least 80% (e.g., 81%, 82%, 83%, 84%, 85%, 86%, 87%, 88%, 89%, 90%, 91%, 92%, 93%, 94%, 95%, 96%, 97%, 98%, 99% or 100%) identical to the nucleotide sequence of SEQ ID NO: 146, 181, or 200.

[0032] In some embodiments, the CRISPR-associated protein comprises an amino acid sequence that is at least 80% (e.g., 81%, 82%, 83%, 84%, 85%, 86%, 87%, 88%, 89%, 90%, 91%, 92%, 93%, 94%, 95%, 96%, 97%, 98%, 99% or 100%) identical to an amino acid sequence of Table 10, and the direct repeat sequence comprises a nucleotide sequence that is at least 80% (e.g., 81%, 82%, 83%, 84%, 85%, 86%, 87%, 88%, 89%, 90%, 91%, 92%, 93%, 94%, 95%, 96%, 97%, 98%, 99% or 100%) identical to a corresponding direct repeat nucleotide sequence listed in Table 11 (e.g., the first or second direct repeat nucleotide sequence of the corresponding row in Table 11), or to a corresponding direct repeat nucleotide sequence listed in Table 7 (e.g., a pre-crRNA Direct Repeat Sequence or a Mature crRNA Direct Repeat Sequence of Table 7).

[0033] In some embodiments of any of the systems described herein, the CRISPR-associated protein is a protein having at least 80% (e.g., 81%, 82%, 83%, 84%, 85%, 86%, 87%, 88%, 89%, 90%, 91%, 92%, 93%, 94%, 95%, 96%, 97%, 98%, 99% or 100%) identity to an amino acid sequence set forth in SEQ ID NO: 101 (CLUST.099129 SRR6837557), SEQ ID NO: 102 (CLUST.099129 3300012971), or SEQ ID NO: 103 (CLUST.099129 3300005764).

[0034] In some embodiments of any of the systems described herein, the CRISPR-associated protein is a protein having at least 80% (e.g., 81%, 82%, 83%, 84%, 85%, 86%, 87%, 88%, 89%, 90%, 91%, 92%, 93%, 94%, 95%, 96%, 97%, 98%, 99% or 100%) identity to an amino acid sequence set forth in SEQ ID NO: 101-145 (CLUST.0991297).

[0035] In some embodiments of any of the systems described herein, the CRISPR-associated protein is capable of recognizing a protospacer adjacent motif (PAM), wherein the PAM includes a nucleic acid sequence, including a nucleic acid sequence set forth as 5′-GTN-3′, 5′-TG-3′, 5′-TR-3′, or 5′-RATG-3′ (SEQ ID NO: 920).

[0036] In some embodiments, the CRISPR-associated protein comprises an amino acid sequence that is at least 80% (e.g., 81%, 82%, 83%, 84%, 85%, 86%, 87%, 88%, 89%, 90%, 91%, 92%, 93%, 94%, 95%, 96%, 97%, 98%, 99% or 100%) identical to the amino acid sequence of SEQ ID NO: 101, and the PAM sequence comprises a nucleic acid sequence set forth as 5′-GTN-3′. In some embodiments, the CRISPR-associated protein comprises an amino acid sequence that is at least 80% (e.g., 81%, 82%, 83%, 84%, 85%, 86%, 87%, 88%, 89%, 90%, 91%, 92%, 93%, 94%, 95%, 96%, 97%, 98%, 99% or 100%) identical to the amino acid sequence of SEQ ID NO: 102, and the PAM sequence comprises a nucleic acid sequence set forth as 5′-TG-3′. In some embodiments, the CRISPR-associated protein comprises an amino acid sequence that is at least 80% (e.g., 81%, 82%, 83%, 84%, 85%, 86%, 87%, 88%, 89%, 90%, 91%, 92%, 93%, 94%, 95%, 96%, 97%, 98%, 99% or 100%) identical to the amino acid sequence of SEQ ID NO: 103, and the PAM sequence comprises a nucleic acid sequence set forth as 5′-TR-3′ or 5′-RATG-3′ (SEQ ID NO: 920).

[0037] In some embodiments of any of the systems described herein, the spacer sequence of the RNA guide includes between about 15 nucleotides to about 55 nucleotides. In some embodiments of any of the systems described herein, the spacer sequence of the RNA guide includes between 26 and 51 nucleotides.

[0038] In another aspect, the disclosure provides a cell (e.g., a genetically modified cell), wherein the cell includes: a CRISPR-associated protein, wherein the CRISPR-associated protein includes an amino acid sequence that is at least 80% (e.g., 81%, 82%, 83%, 84%, 85%, 86%, 87%, 88%, 89%, 90%, 91%, 92%, 93%, 94%, 95%, 96%, 97%, 98%, 99% or 100%) identical to an amino acid sequence set forth in any one of SEQ ID NOs: 101-145; and RNA guide including a direct repeat sequence and a spacer sequence capable of hybridizing to a target nucleic acid. In another aspect, the disclosure provides a cell (e.g., a genetically modified cell), wherein the cell includes: a CRISPR-associated protein or a nucleic acid encoding the CRISPR-associated protein, wherein the CRISPR-associated protein includes an amino acid sequence that is at least 80% (e.g., 81%, 82%, 83%, 84%, 85%, 86%, 87%, 88%, 89%, 90%, 91%, 92%, 93%, 94%, 95%, 96%, 97%, 98%, 99% or 100%) identical to an amino acid sequence set forth in any one of SEQ ID NOs: 101-145; and an RNA guide including a direct repeat sequence and a spacer sequence capable of hybridizing to a target nucleic acid, or a nucleic acid encoding the RNA guide.

[0039] In some embodiments of any of the cells described herein, the CRISPR-associated protein is a protein having at least 80% (e.g., 81%, 82%, 83%, 84%, 85%, 86%, 87%, 88%, 89%, 90%, 91%, 92%, 93%, 94%, 95%, 96%, 97%, 98%, 99% or 100%) identity to an amino acid sequence set forth in SEQ ID NO: 101, SEQ ID NO: 102, or SEQ ID NO: 103.

[0040] In some embodiments of any of the cells described herein, the CRISPR-associated protein is a protein having at least 80% (e.g., 81%, 82%, 83%, 84%, 85%, 86%, 87%, 88%, 89%, 90%, 91%, 92%, 93%, 94%, 95%, 96%, 97%, 98%, 99% or 100%) identity to an amino acid sequence set forth in SEQ ID NO: 101-145.

[0041] In some embodiments of any of the cells described herein, the CRISPR-associated protein is capable of recognizing a PAM sequence including a nucleic acid sequence set forth as 5′-GTN-3′, 5′-TG-3′, 5′-TR-3′, or 5′-RATG-3′ (SEQ ID NO: 920).

[0042] In some embodiments of any of the cells described herein, the direct repeat sequence includes a nucleotide sequence that is at least 80% (e.g., 81%, 82%, 83%, 84%, 85%, 86%, 87%, 88%, 89%, 90%, 91%, 92%, 93%, 94%, 95%, 96%, 97%, 98%, 99% or 100%) identical to a nucleotide sequence set forth in any one of SEQ ID NOs: 146-162, 180-183, or 200-215.

[0043] In some embodiments of any of the cells described herein, the spacer sequence includes between about 15 nucleotides to about 55 nucleotides. In some embodiments of any of the cells described herein, the spacer sequence includes between 26 and 51 nucleotides.

[0044] In another aspect, the disclosure provides methods of modifying a target nucleic acid, the method including delivering to the target nucleic acid an engineered, non-naturally occurring CRISPR-Cas system including: a CRISPR-associated protein, wherein the CRISPR-associated protein includes an amino acid sequence that is at least 80% (e.g., 81%, 82%, 83%, 84%, 85%, 86%, 87%, 88%, 89%, 90%, 91%, 92%, 93%, 94%, 95%, 96%, 97%, 98%, 99% or 100%) identical to an amino acid sequence set forth in any one of SEQ ID NOs: 101-145; and an RNA guide including a direct repeat sequence and a spacer sequence capable of hybridizing to the target nucleic acid; wherein the CRISPR-associated protein is capable of binding to the RNA guide; and wherein recognition of the target nucleic acid by the CRISPR-associated protein and RNA guide results in a modification of the target nucleic acid. In another aspect, the disclosure provides methods of modifying a target nucleic acid, the method including delivering to the target nucleic acid an engineered, non-naturally occurring CRISPR-Cas system including: a CRISPR-associated protein or a nucleic acid encoding the CRISPR-associated protein, wherein the CRISPR-associated protein includes an amino acid sequence that is at least 80% (e.g., 81%, 82%, 83%, 84%, 85%, 86%, 87%, 88%, 89%, 90%, 91%, 92%, 93%, 94%, 95%, 96%, 97%, 98%, 99% or 100%) identical to an amino acid sequence set forth in any one of SEQ ID NOs: 101-145; and an RNA guide including a direct repeat sequence and a spacer sequence capable of hybridizing to the target nucleic acid, or a nucleic acid encoding the RNA guide; wherein the CRISPR-associated protein is capable of binding to the RNA guide; and wherein recognition of the target nucleic acid by the CRISPR-associated protein and RNA guide results in a modification of the target nucleic acid.

[0045] In some embodiments of any of the methods described herein, the CRISPR-associated protein is a protein having at least 80% (e.g., 81%, 82%, 83%, 84%, 85%, 86%, 87%, 88%, 89%, 90%, 91%, 92%, 93%, 94%, 95%, 96%, 97%, 98%, 99% or 100%) identity to an amino acid sequence set forth in SEQ ID NO: 101, SEQ ID NO: 102, or SEQ ID NO: 103.

[0046] In some embodiments of any of the methods described herein, the CRISPR-associated protein is a protein having at least 80% (e.g., 81%, 82%, 83%, 84%, 85%, 86%, 87%, 88%, 89%, 90%, 91%, 92%, 93%, 94%, 95%, 96%, 97%, 98%, 99% or 100%) identity to an amino acid sequence set forth in SEQ ID NO: 101-145.

[0047] In some embodiments of any of the methods described herein, the CRISPR-associated protein is capable of recognizing a PAM sequence including a nucleic acid sequence set forth as 5′-GTN-3′, 5′-TG-3′, 5′-TR-3′, or 5′-RATG-3′.

[0048] In some embodiments of any of the methods described herein, the direct repeat sequence includes a nucleotide sequence that is at least 80% (e.g., 81%, 82%, 83%, 84%, 85%, 86%, 87%, 88%, 89%, 90%, 91%, 92%, 93%, 94%, 95%, 96%, 97%, 98%, 99% or 100%) identical to a nucleotide sequence set forth in any one of SEQ ID NOs: 146-162, 180-183, or 200-215.

[0049] In some embodiments of any of the methods described herein, the spacer sequence includes between about 15 nucleotides to about 55 nucleotides. In some embodiments of any of the methods described herein, the spacer sequence includes between 26 and 51 nucleotides.

[0050] In one aspect, the disclosure provides engineered, non-naturally occurring Clustered Regularly Interspaced Short Palindromic Repeat (CRISPR)—Cas systems of CLUST.342201 including: a CRISPR-associated protein, wherein the CRISPR-associated protein includes an amino acid sequence that is at least 80% (e.g., 81%, 82%, 83%, 84%, 85%, 86%, 87%, 88%, 89%, 90%, 91%, 92%, 93%, 94%, 95%, 96%, 97%, 98%, 99% or 100%) identical to an amino acid sequence set forth in any one of SEQ ID NOs: 301-341; and an RNA guide including a direct repeat sequence and a spacer sequence capable of hybridizing to a target nucleic acid; wherein the CRISPR-associated protein is capable of binding to the RNA guide and of modifying the target nucleic acid sequence complementary to the spacer sequence. In one aspect, the disclosure provides engineered, non-naturally occurring Clustered Regularly Interspaced Short Palindromic Repeat (CRISPR)—Cas systems of CLUST.342201 including: a CRISPR-associated protein or a nucleic acid encoding the CRISPR-associated protein, wherein the CRISPR-associated protein includes an amino acid sequence that is at least 80% (e.g., 81%, 82%, 83%, 84%, 85%, 86%, 87%, 88%, 89%, 90%, 91%, 92%, 93%, 94%, 95%, 96%, 97%, 98%, 99% or 100%) identical to an amino acid sequence set forth in any one of SEQ ID NOs: 301-341; and an RNA guide including a direct repeat sequence and a spacer sequence capable of hybridizing to a target nucleic acid, or a nucleic acid encoding the RNA guide; wherein the CRISPR-associated protein is capable of binding to the RNA guide and of modifying the target nucleic acid sequence complementary to the spacer sequence.

[0051] In some embodiments of any of the systems described herein, the direct repeat sequence includes a nucleotide sequence that is at least 80% (e.g., 81%, 82%, 83%, 84%, 85%, 86%, 87%, 88%, 89%, 90%, 91%, 92%, 93%, 94%, 95%, 96%, 97%, 98%, 99% or 100%) identical to a nucleotide sequence set forth in any one of SEQ ID NOs: 342-362, 384-402, 451, 452, or 454.

[0052] In some embodiments, the CRISPR-associated protein comprises an amino acid sequence that is at least 80% (e.g., 81%, 82%, 83%, 84%, 85%, 86%, 87%, 88%, 89%, 90%, 91%, 92%, 93%, 94%, 95%, 96%, 97%, 98%, 99% or 100%) identical to the amino acid sequence of SEQ ID NO: 301, and the direct repeat sequence comprises a nucleotide sequence that is at least 80% (e.g., 81%, 82%, 83%, 84%, 85%, 86%, 87%, 88%, 89%, 90%, 91%, 92%, 93%, 94%, 95%, 96%, 97%, 98%, 99% or 100%) identical to the nucleotide sequence of SEQ ID NO: 342 or 451.

[0053] In some embodiments, the CRISPR-associated protein comprises an amino acid sequence that is at least 80% (e.g., 81%, 82%, 83%, 84%, 85%, 86%, 87%, 88%, 89%, 90%, 91%, 92%, 93%, 94%, 95%, 96%, 97%, 98%, 99% or 100%) identical to an amino acid sequence of Table 17, and the direct repeat sequence comprises a nucleotide sequence that is at least 80% (e.g., 81%, 82%, 83%, 84%, 85%, 86%, 87%, 88%, 89%, 90%, 91%, 92%, 93%, 94%, 95%, 96%, 97%, 98%, 99% or 100%) identical to a corresponding direct repeat nucleotide sequence listed in Table 14, or to a corresponding direct repeat nucleotide sequence listed in Table 18 (e.g., the first or second direct repeat nucleotide sequence of the corresponding row in Table 18).

[0054] In some embodiments of any of the systems described herein, the CRISPR-associated protein is a protein having at least 80% (e.g., 81%, 82%, 83%, 84%, 85%, 86%, 87%, 88%, 89%, 90%, 91%, 92%, 93%, 94%, 95%, 96%, 97%, 98%, 99% or 100%) identity to an amino acid sequence set forth in SEQ ID NO: 301 (CLUST.342201 3300006417).

[0055] In some embodiments of any of the systems described herein, the CRISPR-associated protein is a protein having at least 80% (e.g., 81%, 82%, 83%, 84%, 85%, 86%, 87%, 88%, 89%, 90%, 91%, 92%, 93%, 94%, 95%, 96%, 97%, 98%, 99% or 100%) identity to an amino acid sequence set forth in SEQ ID NO: 301-341 (CLUST.342201).

[0056] In some embodiments of any of the systems described herein, the CRISPR-associated protein is capable of recognizing a protospacer adjacent motif (PAM), wherein the PAM includes a nucleic acid sequence, including a nucleic acid sequence set forth as 5′-AAG-3′, 5′-AAD-3′, 5′-AAR-3′, 5′-RAAG-3′ (SEQ ID NO: 921), 5′-RAAR-3′ (SEQ ID NO: 922), or 5′-RAAD-3′ (SEQ ID NO: 923).

[0057] In some embodiments, the CRISPR-associated protein comprises an amino acid sequence that is at least 80% (e.g., 81%, 82%, 83%, 84%, 85%, 86%, 87%, 88%, 89%, 90%, 91%, 92%, 93%, 94%, 95%, 96%, 97%, 98%, 99% or 100%) identical to the amino acid sequence of SEQ ID NO:301, and the PAM sequence comprises a nucleic acid sequence set forth as 5′-AAG-3′, 5′-AAD-3′, or 5′-AAR-3′.

[0058] In some embodiments of any of the systems described herein, the spacer sequence of the RNA guide includes between about 12 nucleotides to about 62 nucleotides. In some embodiments of any of the systems described herein, the spacer sequence of the RNA guide includes between 19 and 40 nucleotides.

[0059] In another aspect, the disclosure provides a cell (e.g., a genetically modified cell), wherein the cell includes: a CRISPR-associated protein, wherein the CRISPR-associated protein includes an amino acid sequence that is at least 80% (e.g., 81%, 82%, 83%, 84%, 85%, 86%, 87%, 88%, 89%, 90%, 91%, 92%, 93%, 94%, 95%, 96%, 97%, 98%, 99% or 100%) identical to an amino acid sequence set forth in any one of SEQ ID NOs: 301-341; an RNA guide including a direct repeat sequence and a spacer sequence capable of hybridizing to a target nucleic acid. In another aspect, the disclosure provides a cell (e.g., a genetically modified cell), wherein the cell includes: a CRISPR-associated protein or a nucleic acid encoding the CRISPR-associated protein, wherein the CRISPR-associated protein includes an amino acid sequence that is at least 80% (e.g., 81%, 82%, 83%, 84%, 85%, 86%, 87%, 88%, 89%, 90%, 91%, 92%, 93%, 94%, 95%, 96%, 97%, 98%, 99% or 100%) identical to an amino acid sequence set forth in any one of SEQ ID NOs: 301-341; and an RNA guide including a direct repeat sequence and a spacer sequence capable of hybridizing to a target nucleic acid, or a nucleic acid encoding the RNA guide.

[0060] In some embodiments of any of the cells described herein, the CRISPR-associated protein is a protein having at least 80% (e.g., 81%, 82%, 83%, 84%, 85%, 86%, 87%, 88%, 89%, 90%, 91%, 92%, 93%, 94%, 95%, 96%, 97%, 98%, 99% or 100%) identity to an amino acid sequence set forth in SEQ ID NO: 301.

[0061] In some embodiments of any of the cells described herein, the CRISPR-associated protein is a protein having at least 80% (e.g., 81%, 82%, 83%, 84%, 85%, 86%, 87%, 88%, 89%, 90%, 91%, 92%, 93%, 94%, 95%, 96%, 97%, 98%, 99% or 100%) identity to an amino acid sequence set forth in SEQ ID NO: 301-341.

[0062] In some embodiments of any of the cells described herein, the CRISPR-associated protein is capable of recognizing a PAM sequence including a nucleic acid sequence set forth as 5′-AAG-3′, 5′-AAD-3′, 5′-AAR-3′, 5′-RAAG-3′ (SEQ ID NO: 921), 5′-RAAR-3′ (SEQ ID NO: 922), 5′-RAAD-3′ (SEQ ID NO: 923).

[0063] In some embodiments of any of the cells described herein, the direct repeat sequence includes a nucleotide sequence that is at least 80% (e.g., 81%, 82%, 83%, 84%, 85%, 86%, 87%, 88%, 89%, 90%, 91%, 92%, 93%, 94%, 95%, 96%, 97%, 98%, 99% or 100%) identical to a nucleotide sequence set forth in any one of SEQ ID NOs: 342-362, 384-402, 451, 452, or 454.

[0064] In some embodiments of any of the cells described herein, the spacer sequence includes between about 12 nucleotides to about 62 nucleotides. In some embodiments of any of the cells described herein, the spacer sequence includes between 19 and 40 nucleotides.

[0065] In another aspect, the disclosure provides methods of modifying a target nucleic acid, the method including delivering to the target nucleic acid an engineered, non-naturally occurring CRISPR-Cas system including: a CRISPR-associated protein, wherein the CRISPR-associated protein includes an amino acid sequence that is at least 80% (e.g., 81%, 82%, 83%, 84%, 85%, 86%, 87%, 88%, 89%, 90%, 91%, 92%, 93%, 94%, 95%, 96%, 97%, 98%, 99% or 100%) identical to an amino acid sequence set forth in any one of SEQ ID NOs: 301-341; and an RNA guide including a direct repeat sequence and a spacer sequence capable of hybridizing to the target nucleic acid; wherein the CRISPR-associated protein is capable of binding to the RNA guide; and wherein recognition of the target nucleic acid by the CRISPR-associated protein and RNA guide results in a modification of the target nucleic acid. In another aspect, the disclosure provides methods of modifying a target nucleic acid, the method including delivering to the target nucleic acid an engineered, non-naturally occurring CRISPR-Cas system including: a CRISPR-associated protein or a nucleic acid encoding the CRISPR-associated protein, wherein the CRISPR-associated protein includes an amino acid sequence that is at least 80% (e.g., 81%, 82%, 83%, 84%, 85%, 86%, 87%, 88%, 89%, 90%, 91%, 92%, 93%, 94%, 95%, 96%, 97%, 98%, 99% or 100%) identical to an amino acid sequence set forth in any one of SEQ ID NOs: 301-341; and an RNA guide including a direct repeat sequence and a spacer sequence capable of hybridizing to the target nucleic acid, or a nucleic acid encoding the RNA guide; wherein the CRISPR-associated protein is capable of binding to the RNA guide; and wherein recognition of the target nucleic acid by the CRISPR-associated protein and RNA guide results in a modification of the target nucleic acid.

[0066] In some embodiments of any of the methods described herein, the CRISPR-associated protein is a protein having at least 80% (e.g., 81%, 82%, 83%, 84%, 85%, 86%, 87%, 88%, 89%, 90%, 91%, 92%, 93%, 94%, 95%, 96%, 97%, 98%, 99% or 100%) identity to an amino acid sequence set forth in SEQ ID NO: 301.

[0067] In some embodiments of any of the methods described herein, the CRISPR-associated protein is a protein having at least 80% (e.g., 81%, 82%, 83%, 84%, 85%, 86%, 87%, 88%, 89%, 90%, 91%, 92%, 93%, 94%, 95%, 96%, 97%, 98%, 99% or 100%) identity to an amino acid sequence set forth in SEQ ID NO: 301-341.

[0068] In some embodiments of any of the methods described herein, the CRISPR-associated protein is capable of recognizing a PAM sequence including a nucleic acid sequence set forth as 5′-AAG-3′, 5′-AAD-3′, 5′-AAR-3′, 5′-RAAG-3′ (SEQ ID NO: 921), 5′-RAAR-3′ (SEQ ID NO: 922), 5′-RAAD-3′ (SEQ ID NO: 923).

[0069] In some embodiments of any of the methods described herein, the direct repeat sequence includes a nucleotide sequence that is at least 80% (e.g., 81%, 82%, 83%, 84%, 85%, 86%, 87%, 88%, 89%, 90%, 91%, 92%, 93%, 94%, 95%, 96%, 97%, 98%, 99% or 100%) identical to a nucleotide sequence set forth in any one of SEQ ID NOs: 342-362, 384-402, 451, 452, or 454.

[0070] In some embodiments of any of the methods described herein, the spacer sequence includes between about 12 nucleotides to about 62 nucleotides. In some embodiments of any of the methods described herein, the spacer sequence includes between 19 and 40 nucleotides.

[0071] In one aspect, the disclosure provides engineered, non-naturally occurring Clustered Regularly Interspaced Short Palindromic Repeat (CRISPR)—Cas systems of CLUST.195009 including: a CRISPR-associated protein, wherein the CRISPR-associated protein includes an amino acid sequence that is at least 80% (e.g., 81%, 82%, 83%, 84%, 85%, 86%, 87%, 88%, 89%, 90%, 91%, 92%, 93%, 94%, 95%, 96%, 97%, 98%, 99% or 100%) identical to an amino acid sequence set forth in any one of SEQ ID NOs: 501-521; and an RNA guide including a direct repeat sequence and a spacer sequence capable of hybridizing to a target nucleic acid; wherein the CRISPR-associated protein is capable of binding to the RNA guide and of modifying the target nucleic acid sequence complementary to the spacer sequence. In one aspect, the disclosure provides engineered, non-naturally occurring Clustered Regularly Interspaced Short Palindromic Repeat (CRISPR)—Cas systems of CLUST.195009 including: a CRISPR-associated protein or a nucleic acid encoding the CRISPR-associated protein, wherein the CRISPR-associated protein includes an amino acid sequence that is at least 80% (e.g., 81%, 82%, 83%, 84%, 85%, 86%, 87%, 88%, 89%, 90%, 91%, 92%, 93%, 94%, 95%, 96%, 97%, 98%, 99% or 100%) identical to an amino acid sequence set forth in any one of SEQ ID NOs: 501-521; and an RNA guide including a direct repeat sequence and a spacer sequence capable of hybridizing to a target nucleic acid, or a nucleic acid encoding the RNA guide; wherein the CRISPR-associated protein is capable of binding to the RNA guide and of modifying the target nucleic acid sequence complementary to the spacer sequence.

[0072] In some embodiments of any of the systems described herein, the direct repeat sequence includes a nucleotide sequence that is at least 80% (e.g., 81%, 82%, 83%, 84%, 85%, 86%, 87%, 88%, 89%, 90%, 91%, 92%, 93%, 94%, 95%, 96%, 97%, 98%, 99% or 100%) identical to a nucleotide sequence set forth in any one of SEQ ID NOs: 522-532, 535, or 539-549.

[0073] In some embodiments, the CRISPR-associated protein comprises an amino acid sequence that is at least 80% (e.g., 81%, 82%, 83%, 84%, 85%, 86%, 87%, 88%, 89%, 90%, 91%, 92%, 93%, 94%, 95%, 96%, 97%, 98%, 99% or 100%) identical to the amino acid sequence of SEQ ID NO: 501, and the direct repeat sequence comprises a nucleotide sequence that is at least 80% (e.g., 81%, 82%, 83%, 84%, 85%, 86%, 87%, 88%, 89%, 90%, 91%, 92%, 93%, 94%, 95%, 96%, 97%, 98%, 99% or 100%) identical to the nucleotide sequence of SEQ ID NO: 522 or 539.

[0074] In some embodiments, the CRISPR-associated protein comprises an amino acid sequence that is at least 80% (e.g., 81%, 82%, 83%, 84%, 85%, 86%, 87%, 88%, 89%, 90%, 91%, 92%, 93%, 94%, 95%, 96%, 97%, 98%, 99% or 100%) identical to an amino acid sequence of Table 23, and the direct repeat sequence comprises a nucleotide sequence that is at least 80% (e.g., 81%, 82%, 83%, 84%, 85%, 86%, 87%, 88%, 89%, 90%, 91%, 92%, 93%, 94%, 95%, 96%, 97%, 98%, 99% or 100%) identical to a corresponding direct repeat nucleotide sequence listed in Table 20, or to a corresponding direct repeat nucleotide sequence listed in Table 24 (e.g., the first or second direct repeat nucleotide sequence of the corresponding row in Table 24).

[0075] In some embodiments of any of the systems described herein, the CRISPR-associated protein is a protein having at least 80% (e.g., 81%, 82%, 83%, 84%, 85%, 86%, 87%, 88%, 89%, 90%, 91%, 92%, 93%, 94%, 95%, 96%, 97%, 98%, 99% or 100%) identity to an amino acid sequence set forth in SEQ ID NO: 501 (CLUST.195009 SRR6201554).

[0076] In some embodiments of any of the systems described herein, the CRISPR-associated protein is a protein having at least 80% (e.g., 81%, 82%, 83%, 84%, 85%, 86%, 87%, 88%, 89%, 90%, 91%, 92%, 93%, 94%, 95%, 96%, 97%, 98%, 99% or 100%) identity to an amino acid sequence set forth in SEQ ID NO: 501-521 (CLUST.195009).

[0077] In some embodiments of any of the systems described herein, the CRISPR-associated protein is capable of recognizing a protospacer adjacent motif (PAM), wherein the PAM includes a nucleic acid sequence, including a nucleic acid sequence set forth as 5′-TTN-3′.

[0078] In some embodiments, the CRISPR-associated protein comprises an amino acid sequence that is at least 80% (e.g., 81%, 82%, 83%, 84%, 85%, 86%, 87%, 88%, 89%, 90%, 91%, 92%, 93%, 94%, 95%, 96%, 97%, 98%, 99% or 100%) identical to the amino acid sequence of SEQ ID NO:501, and the PAM sequence comprises a nucleic acid sequence set forth as 5′-TTN-3′.

[0079] In some embodiments of any of the systems described herein, the spacer sequence of the RNA guide includes between about 15 nucleotides to about 55 nucleotides. In some embodiments of any of the systems described herein, the spacer sequence of the RNA guide includes between 20 and 39 nucleotides.

[0080] In another aspect, the disclosure provides a cell (e.g., a genetically modified cell), wherein the cell includes: a CRISPR-associated protein, wherein the CRISPR-associated protein includes an amino acid sequence that is at least 80% (e.g., 81%, 82%, 83%, 84%, 85%, 86%, 87%, 88%, 89%, 90%, 91%, 92%, 93%, 94%, 95%, 96%, 97%, 98%, 99% or 100%) identical to an amino acid sequence set forth in any one of SEQ ID NOs: 501-521; an RNA guide including a direct repeat sequence and a spacer sequence capable of hybridizing to a target nucleic acid. In another aspect, the disclosure provides a cell (e.g., a genetically modified cell), wherein the cell includes: a CRISPR-associated protein or a nucleic acid encoding the CRISPR-associated protein, wherein the CRISPR-associated protein includes an amino acid sequence that is at least 80% (e.g., 81%, 82%, 83%, 84%, 85%, 86%, 87%, 88%, 89%, 90%, 91%, 92%, 93%, 94%, 95%, 96%, 97%, 98%, 99% or 100%) identical to an amino acid sequence set forth in any one of SEQ ID NOs: 501-521; and an RNA guide including a direct repeat sequence and a spacer sequence capable of hybridizing to a target nucleic acid, or a nucleic acid encoding the RNA guide.

[0081] In some embodiments of any of the cells described herein, the CRISPR-associated protein is a protein having at least 80% (e.g., 81%, 82%, 83%, 84%, 85%, 86%, 87%, 88%, 89%, 90%, 91%, 92%, 93%, 94%, 95%, 96%, 97%, 98%, 99% or 100%) identity to an amino acid sequence set forth in SEQ ID NO: 501.

[0082] In some embodiments of any of the cells described herein, the CRISPR-associated protein is a protein having at least 80% (e.g., 81%, 82%, 83%, 84%, 85%, 86%, 87%, 88%, 89%, 90%, 91%, 92%, 93%, 94%, 95%, 96%, 97%, 98%, 99% or 100%) identity to an amino acid sequence set forth in SEQ ID NO: 501-521.

[0083] In some embodiments of any of the cells described herein, the CRISPR-associated protein is capable of recognizing a PAM sequence including a nucleic acid sequence set forth as 5′-TTN-3′.

[0084] In some embodiments of any of the cells described herein, the direct repeat sequence includes a nucleotide sequence that is at least 80% (e.g., 81%, 82%, 83%, 84%, 85%, 86%, 87%, 88%, 89%, 90%, 91%, 92%, 93%, 94%, 95%, 96%, 97%, 98%, 99% or 100%) identical to a nucleotide sequence set forth in any one of SEQ ID NOs: 522-532, 535, or 539-549.

[0085] In some embodiments of any of the cells described herein, the spacer sequence includes between about 15 nucleotides to about 55 nucleotides. In some embodiments of any of the cells described herein, the spacer sequence includes between 20 and 39 nucleotides.

[0086] In another aspect, the disclosure provides methods of modifying a target nucleic acid, the method including delivering to the target nucleic acid an engineered, non-naturally occurring CRISPR-Cas system including: a CRISPR-associated protein, wherein the CRISPR-associated protein includes an amino acid sequence that is at least 80% (e.g., 81%, 82%, 83%, 84%, 85%, 86%, 87%, 88%, 89%, 90%, 91%, 92%, 93%, 94%, 95%, 96%, 97%, 98%, 99% or 100%) identical to an amino acid sequence set forth in any one of SEQ ID NOs: 501-521; and an RNA guide including a direct repeat sequence and a spacer sequence capable of hybridizing to the target nucleic acid; wherein the CRISPR-associated protein is capable of binding to the RNA guide; and wherein recognition of the target nucleic acid by the CRISPR-associated protein and RNA guide results in a modification of the target nucleic acid. In another aspect, the disclosure provides methods of modifying a target nucleic acid, the method including delivering to the target nucleic acid an engineered, non-naturally occurring CRISPR-Cas system including: a CRISPR-associated protein or a nucleic acid encoding the CRISPR-associated protein, wherein the CRISPR-associated protein includes an amino acid sequence that is at least 80% (e.g., 81%, 82%, 83%, 84%, 85%, 86%, 87%, 88%, 89%, 90%, 91%, 92%, 93%, 94%, 95%, 96%, 97%, 98%, 99% or 100%) identical to an amino acid sequence set forth in any one of SEQ ID NOs: 501-521; and an RNA guide including a direct repeat sequence and a spacer sequence capable of hybridizing to the target nucleic acid, or a nucleic acid encoding the RNA guide; wherein the CRISPR-associated protein is capable of binding to the RNA guide; and wherein recognition of the target nucleic acid by the CRISPR-associated protein and RNA guide results in a modification of the target nucleic acid.

[0087] In some embodiments of any of the methods described herein, the CRISPR-associated protein is a protein having at least 80% (e.g., 81%, 82%, 83%, 84%, 85%, 86%, 87%, 88%, 89%, 90%, 91%, 92%, 93%, 94%, 95%, 96%, 97%, 98%, 99% or 100%) identity to an amino acid sequence set forth in SEQ ID NO: 501.

[0088] In some embodiments of any of the methods described herein, the CRISPR-associated protein is a protein having at least 80% (e.g., 81%, 82%, 83%, 84%, 85%, 86%, 87%, 88%, 89%, 90%, 91%, 92%, 93%, 94%, 95%, 96%, 97%, 98%, 99% or 100%) identity to an amino acid sequence set forth in SEQ ID NO: 501-521.

[0089] In some embodiments of any of the methods described herein, the CRISPR-associated protein is capable of recognizing a PAM sequence including a nucleic acid sequence set forth as 5′-TTN-3′.

[0090] In some embodiments of any of the methods described herein, the direct repeat sequence includes a nucleotide sequence that is at least 80% (e.g., 81%, 82%, 83%, 84%, 85%, 86%, 87%, 88%, 89%, 90%, 91%, 92%, 93%, 94%, 95%, 96%, 97%, 98%, 99% or 100%) identical to a nucleotide sequence set forth in any one of SEQ ID NOs: 522-532, 535, or 539-549.

[0091] In some embodiments of any of the methods described herein, the spacer sequence includes between about 15 nucleotides to about 55 nucleotides. In some embodiments of any of the methods described herein, the spacer sequence includes between 20 and 39 nucleotides.

[0092] In one aspect, the disclosure provides engineered, non-naturally occurring Clustered Regularly Interspaced Short Palindromic Repeat (CRISPR)—Cas systems of CLUST.057059 including: a CRISPR-associated protein, wherein the CRISPR-associated protein includes an amino acid sequence that is at least 80% (e.g., 81%, 82%, 83%, 84%, 85%, 86%, 87%, 88%, 89%, 90%, 91%, 92%, 93%, 94%, 95%, 96%, 97%, 98%, 99% or 100%) identical to an amino acid sequence set forth in any one of SEQ ID NOs: 601-682; and an RNA guide including a direct repeat sequence and a spacer sequence capable of hybridizing to a target nucleic acid; wherein the CRISPR-associated protein is capable of binding to the RNA guide and of modifying the target nucleic acid sequence complementary to the spacer sequence. In one aspect, the disclosure provides engineered, non-naturally occurring Clustered Regularly Interspaced Short Palindromic Repeat (CRISPR)—Cas systems of CLUST.057059 including: a CRISPR-associated protein or a nucleic acid encoding the CRISPR-associated protein, wherein the CRISPR-associated protein includes an amino acid sequence that is at least 80% (e.g., 81%, 82%, 83%, 84%, 85%, 86%, 87%, 88%, 89%, 90%, 91%, 92%, 93%, 94%, 95%, 96%, 97%, 98%, 99% or 100%) identical to an amino acid sequence set forth in any one of SEQ ID NOs: 601-682; and an RNA guide including a direct repeat sequence and a spacer sequence capable of hybridizing to a target nucleic acid, or a nucleic acid encoding the RNA guide; wherein the CRISPR-associated protein is capable of binding to the RNA guide and of modifying the target nucleic acid sequence complementary to the spacer sequence.

[0093] In some embodiments of any of the systems described herein, the direct repeat sequence includes a nucleotide sequence that is at least 80% (e.g., 81%, 82%, 83%, 84%, 85%, 86%, 87%, 88%, 89%, 90%, 91%, 92%, 93%, 94%, 95%, 96%, 97%, 98%, 99% or 100%) identical to a nucleotide sequence set forth in any one of SEQ ID NOs: 683-734 or 751-802.

[0094] In some embodiments, the CRISPR-associated protein comprises an amino acid sequence that is at least 80% (e.g., 81%, 82%, 83%, 84%, 85%, 86%, 87%, 88%, 89%, 90%, 91%, 92%, 93%, 94%, 95%, 96%, 97%, 98%, 99% or 100%) identical to the amino acid sequence of SEQ ID NO: 601, and the direct repeat sequence comprises a nucleotide sequence that is at least 80% (e.g., 81%, 82%, 83%, 84%, 85%, 86%, 87%, 88%, 89%, 90%, 91%, 92%, 93%, 94%, 95%, 96%, 97%, 98%, 99% or 100%) identical to the nucleotide sequence of SEQ ID NO: 683 or 751.

[0095] In some embodiments, the CRISPR-associated protein comprises an amino acid sequence that is at least 80% (e.g., 81%, 82%, 83%, 84%, 85%, 86%, 87%, 88%, 89%, 90%, 91%, 92%, 93%, 94%, 95%, 96%, 97%, 98%, 99% or 100%) identical to an amino acid sequence of Table 29, and the direct repeat sequence comprises a nucleotide sequence that is at least 80% (e.g., 81%, 82%, 83%, 84%, 85%, 86%, 87%, 88%, 89%, 90%, 91%, 92%, 93%, 94%, 95%, 96%, 97%, 98%, 99% or 100%) identical to a corresponding direct repeat nucleotide sequence listed in Table 26, or to a corresponding direct repeat nucleotide sequence listed in Table 30 (e.g., the first or second direct repeat nucleotide sequence of the corresponding row in Table 30).

[0096] In some embodiments of any of the systems described herein, the CRISPR-associated protein is a protein having at least 80% (e.g., 81%, 82%, 83%, 84%, 85%, 86%, 87%, 88%, 89%, 90%, 91%, 92%, 93%, 94%, 95%, 96%, 97%, 98%, 99% or 100%) identity to an amino acid sequence set forth in SEQ ID NO: 601 (CLUST.057059 3300023179).

[0097] In some embodiments of any of the systems described herein, the CRISPR-associated protein is a protein having at least 80% (e.g., 81%, 82%, 83%, 84%, 85%, 86%, 87%, 88%, 89%, 90%, 91%, 92%, 93%, 94%, 95%, 96%, 97%, 98%, 99% or 100%) identity to an amino acid sequence set forth in SEQ ID NO: 601-682 (CLUST.057059).

[0098] In some embodiments of any of the systems described herein, the CRISPR-associated protein is capable of recognizing a protospacer adjacent motif (PAM), wherein the PAM includes a nucleic acid sequence, including a nucleic acid sequence set forth as 5′-GTN-3′.

[0099] In some embodiments, the CRISPR-associated protein comprises an amino acid sequence that is at least 80% (e.g., 81%, 82%, 83%, 84%, 85%, 86%, 87%, 88%, 89%, 90%, 91%, 92%, 93%, 94%, 95%, 96%, 97%, 98%, 99% or 100%) identical to the amino acid sequence of SEQ ID NO: 601, and the PAM sequence comprises a nucleic acid sequence set forth as 5′-GTN-3′.

[0100] In some embodiments of any of the systems described herein, the spacer sequence of the RNA guide includes between about 15 nucleotides to about 50 nucleotides. In some embodiments of any of the systems described herein, the spacer sequence of the RNA guide includes between 20 and 44 nucleotides.

[0101] In another aspect, the disclosure provides a cell (e.g., a genetically modified cell), wherein the cell includes: a CRISPR-associated protein, wherein the CRISPR-associated protein includes an amino acid sequence that is at least 80% (e.g., 81%, 82%, 83%, 84%, 85%, 86%, 87%, 88%, 89%, 90%, 91%, 92%, 93%, 94%, 95%, 96%, 97%, 98%, 99% or 100%) identical to an amino acid sequence set forth in any one of SEQ ID NOs: 601-682; an RNA guide including a direct repeat sequence and a spacer sequence capable of hybridizing to a target nucleic acid. In another aspect, the disclosure provides a cell (e.g., a genetically modified cell), wherein the cell includes: a CRISPR-associated protein or a nucleic acid encoding the CRISPR-associated protein, wherein the CRISPR-associated protein includes an amino acid sequence that is at least 80% (e.g., 81%, 82%, 83%, 84%, 85%, 86%, 87%, 88%, 89%, 90%, 91%, 92%, 93%, 94%, 95%, 96%, 97%, 98%, 99% or 100%) identical to an amino acid sequence set forth in any one of SEQ ID NOs: 601-682; and an RNA guide including a direct repeat sequence and a spacer sequence capable of hybridizing to a target nucleic acid, or a nucleic acid encoding the RNA guide.

[0102] In some embodiments of any of the cells described herein, the CRISPR-associated protein is a protein having at least 80% (e.g., 81%, 82%, 83%, 84%, 85%, 86%, 87%, 88%, 89%, 90%, 91%, 92%, 93%, 94%, 95%, 96%, 97%, 98%, 99% or 100%) identity to an amino acid sequence set forth in SEQ ID NO: 601.

[0103] In some embodiments of any of the cells described herein, the CRISPR-associated protein is a protein having at least 80% (e.g., 81%, 82%, 83%, 84%, 85%, 86%, 87%, 88%, 89%, 90%, 91%, 92%, 93%, 94%, 95%, 96%, 97%, 98%, 99% or 100%) identity to an amino acid sequence set forth in SEQ ID NO: 601-682.

[0104] In some embodiments of any of the cells described herein, the CRISPR-associated protein is capable of recognizing a PAM sequence including a nucleic acid sequence set forth as 5′-GTN-3′.

[0105] In some embodiments of any of the cells described herein, the direct repeat sequence includes a nucleotide sequence that is at least 80% (e.g., 81%, 82%, 83%, 84%, 85%, 86%, 87%, 88%, 89%, 90%, 91%, 92%, 93%, 94%, 95%, 96%, 97%, 98%, 99% or 100%) identical to a nucleotide sequence set forth in any one of SEQ ID NOs: 683-734 or 751-802.

[0106] In some embodiments of any of the cells described herein, the spacer sequence includes between about 15 nucleotides to about 50 nucleotides. In some embodiments of any of the cells described herein, the spacer sequence includes between 20 and 44 nucleotides.

[0107] In another aspect, the disclosure provides methods of modifying a target nucleic acid, the method including delivering to the target nucleic acid an engineered, non-naturally occurring CRISPR-Cas system including: a CRISPR-associated protein, wherein the CRISPR-associated protein includes an amino acid sequence that is at least 80% (e.g., 81%, 82%, 83%, 84%, 85%, 86%, 87%, 88%, 89%, 90%, 91%, 92%, 93%, 94%, 95%, 96%, 97%, 98%, 99% or 100%) identical to an amino acid sequence set forth in any one of SEQ ID NOs: 601-682; and an RNA guide including a direct repeat sequence and a spacer sequence capable of hybridizing to the target nucleic acid; wherein the CRISPR-associated protein is capable of binding to the RNA guide; and wherein recognition of the target nucleic acid by the CRISPR-associated protein and RNA guide results in a modification of the target nucleic acid. In another aspect, the disclosure provides methods of modifying a target nucleic acid, the method including delivering to the target nucleic acid an engineered, non-naturally occurring CRISPR-Cas system including: a CRISPR-associated protein or a nucleic acid encoding the CRISPR-associated protein, wherein the CRISPR-associated protein includes an amino acid sequence that is at least 80% (e.g., 81%, 82%, 83%, 84%, 85%, 86%, 87%, 88%, 89%, 90%, 91%, 92%, 93%, 94%, 95%, 96%, 97%, 98%, 99% or 100%) identical to an amino acid sequence set forth in any one of SEQ ID NOs: 601-682; and an RNA guide including a direct repeat sequence and a spacer sequence capable of hybridizing to the target nucleic acid, or a nucleic acid encoding the RNA guide; wherein the CRISPR-associated protein is capable of binding to the RNA guide; and wherein recognition of the target nucleic acid by the CRISPR-associated protein and RNA guide results in a modification of the target nucleic acid.

[0108] In some embodiments of any of the methods described herein, the CRISPR-associated protein is a protein having at least 80% (e.g., 81%, 82%, 83%, 84%, 85%, 86%, 87%, 88%, 89%, 90%, 91%, 92%, 93%, 94%, 95%, 96%, 97%, 98%, 99% or 100%) identity to an amino acid sequence set forth in SEQ ID NO: 601.

[0109] In some embodiments of any of the methods described herein, the CRISPR-associated protein is a protein having at least 80% (e.g., 81%, 82%, 83%, 84%, 85%, 86%, 87%, 88%, 89%, 90%, 91%, 92%, 93%, 94%, 95%, 96%, 97%, 98%, 99% or 100%) identity to an amino acid sequence set forth in SEQ ID NO: 601-682.

[0110] In some embodiments of any of the methods described herein, the CRISPR-associated protein is capable of recognizing a PAM sequence including a nucleic acid sequence set forth as 5′-GTN-3′.

[0111] In some embodiments of any of the methods described herein, the direct repeat sequence includes a nucleotide sequence that is at least 80% (e.g., 81%, 82%, 83%, 84%, 85%, 86%, 87%, 88%, 89%, 90%, 91%, 92%, 93%, 94%, 95%, 96%, 97%, 98%, 99% or 100%) identical to a nucleotide sequence set forth in any one of SEQ ID NOs: 683-734 or 751-802.

[0112] In some aspects, the present disclosure provides a method of introducing an insertion or deletion into a target nucleic acid in a mammalian cell, comprising a transfection of: (a) a nucleic acid sequence encoding a CRISPR-associated protein described herein, e.g., wherein the CRISPR-associated protein comprises an amino acid sequence that is at least 80% (e.g., 81%, 82%, 83%, 84%, 85%, 86%, 87%, 88%, 89%, 90%, 91%, 92%, 93%, 94%, 95%, 96%, 97%, 98%, 99% or 100%) identical to an amino acid sequence set forth in any one of SEQ ID NOs: 1-50, 101-145, 301-341, 501-521, or 601-682; and (b) an RNA guide (or a nucleic acid encoding the RNA guide) comprising a direct repeat sequence and a spacer sequence capable of hybridizing to the target nucleic acid, e.g., an RNA guide described herein; wherein the CRISPR-associated protein is capable of binding to the RNA guide; and wherein recognition of the target nucleic acid by the CRISPR-associated protein and RNA guide results in a modification of the target nucleic acid. In some embodiments, the CRISPR-associated protein comprises an amino acid sequence that is at least 80% (e.g., 81%, 82%, 83%, 84%, 85%, 86%, 87%, 88%, 89%, 90%, 91%, 92%, 93%, 94%, 95%, 96%, 97%, 98%, 99% or 100%) identical to an amino acid sequence set forth in any one of SEQ ID NOs: 1, 101, 301, 501, or 601. In some embodiments, the CRISPR-associated protein comprises an amino acid sequence of one of any one of SEQ ID NOs: 1, 101, 301, 501, or 601. In some embodiments, the transfection is a transient transfection. In some embodiments, the cell is a human cell.

[0113] In some embodiments of any of the methods described herein, the spacer sequence includes between about 15 nucleotides to about 50 nucleotides. In some embodiments of any of the methods described herein, the spacer sequence includes between 20 and 44 nucleotides.

[0114] In some embodiments of any of the systems described herein, the CRISPR-associated protein includes at least one (e.g., one, two, or three) RuvC domain or at least one split RuvC domain.

[0115] In some embodiments of any of the systems described herein, the CRISPR-associated protein comprises a catalytic residue (e.g., aspartic acid or glutamic acid). In some embodiments of any of the systems described herein, the CRISPR-associated protein cleaves the target nucleic acid. In some embodiments of any of the systems described herein, the CRISPR-associated protein further comprises a peptide tag, a fluorescent protein, a base-editing domain, a DNA methylation domain, a histone residue modification domain, a localization factor, a transcription modification factor, a light-gated control factor, a chemically inducible factor, or a chromatin visualization factor.

[0116] In some embodiments of any of the systems described herein, the nucleic acid encoding the CRISPR-associated protein is codon-optimized for expression in a cell, e.g., a eukaryotic cell, e.g., a mammalian cell, e.g., a human cell. In some embodiments of any of the systems described herein, the nucleic acid encoding the CRISPR-associated protein is operably linked to a promoter. In some embodiments of any of the systems described herein, the nucleic acid encoding the CRISPR-associated protein is in a vector. In some embodiments, the vector comprises a retroviral vector, a lentiviral vector, a phage vector, an adenoviral vector, an adeno-associated vector, or a herpes simplex vector.

[0117] In some embodiments of any of the systems described herein, the target nucleic acid is a DNA molecule. In some embodiments of any of the systems described herein, the target nucleic acid includes a PAM sequence.

[0118] In some embodiments of any of the systems described herein, the CRISPR-associated protein has non-specific nuclease activity.

[0119] In some embodiments of any of the systems described herein, recognition of the target nucleic acid by the CRISPR-associated protein and RNA guide results in a modification of the target nucleic acid. In some embodiments of any of the systems described herein, the modification of the target nucleic acid is a double-stranded cleavage event. In some embodiments of any of the systems described herein, the modification of the target nucleic acid is a single-stranded cleavage event. In some embodiments of any of the systems described herein, the modification of the target nucleic acid results in an insertion event. In some embodiments of any of the systems described herein, the modification of the target nucleic acid results in a deletion event. In some embodiments of any of the systems described herein, the modification of the target nucleic acid results in cell toxicity or cell death.

[0120] In some embodiments of any of the systems described herein, the system further includes a donor template nucleic acid. In some embodiments of any of the systems described herein, the donor template nucleic acid is a DNA molecule. In some embodiments of any of the systems described herein, wherein the donor template nucleic acid is an RNA molecule.

[0121] In some embodiments of any of the systems described herein, the system does not include a tracrRNA. In some embodiments of any of the systems described herein, the CRISPR-associated protein is self-processing.

[0122] In some embodiments of any of the systems described herein, the system further includes a tracrRNA. In some embodiments of any of the systems described herein, the system further includes a modulator RNA.

[0123] In some embodiments of any of the systems described herein, the system is present in a delivery composition comprising a nanoparticle, a liposome, an exosome, a microvesicle, or a gene-gun.

[0124] In some embodiments of any of the systems described herein, the systems are within a cell. In some embodiments, the cell is a eukaryotic cell. In some embodiments, the cell is a mammalian cell. In some embodiments, the cell is a human cell. In some embodiments, the cell is a prokaryotic cell.

[0125] In some embodiments of any of the cells described herein, the CRISPR-associated protein includes at least one (e.g., one, two, or three) RuvC domain or at least one split RuvC domain.

[0126] In some embodiments of any of the cells described herein, the CRISPR-associated protein comprises a catalytic residue (e.g., aspartic acid or glutamic acid). In some embodiments of any of the cells described herein, the CRISPR-associated protein cleaves the target nucleic acid. In some embodiments of any of the cells described herein, the CRISPR-associated protein further comprises a peptide tag, a fluorescent protein, a base-editing domain, a DNA methylation domain, a histone residue modification domain, a localization factor, a transcription modification factor, a light-gated control factor, a chemically inducible factor, or a chromatin visualization factor.

[0127] In some embodiments of any of the cells described herein, the nucleic acid encoding the CRISPR-associated protein is codon-optimized for expression in a cell, e.g., a eukaryotic cell, e.g., a mammalian cell, e.g., a human cell. In some embodiments of any of the cells described herein, the nucleic acid encoding the CRISPR-associated protein is operably linked to a promoter. In some embodiments of any of the cells described herein, the nucleic acid encoding the CRISPR-associated protein is in a vector. In some embodiments, the vector comprises a retroviral vector, a lentiviral vector, a phage vector, an adenoviral vector, an adeno-associated vector, or a herpes simplex vector.

[0128] In some embodiments of any of the cells described herein, the cell does not include a tracrRNA. In some embodiments of any of the cells described herein, the cell optionally includes a tracrRNA. In some embodiments of any of the cells described herein, the CRISPR-associated protein is self-processing.

[0129] In some embodiments of any of the cells described herein, the cell further includes a tracrRNA. In some embodiments of any of the cells described herein, the cell further includes a modulator RNA.

[0130] In some embodiments of any of the cells described herein, the cell is a eukaryotic cell. In some embodiments of any of the cells described herein, the cell is a mammalian cell. In some embodiments of any of the cells described herein, the cell is a human cell. In some embodiments of any of the cells described herein, the cell is a prokaryotic cell. In some embodiments, of any of the cells described herein, the cell is a genetically engineered cell.

[0131] In some embodiments of any of the cells described herein, the target nucleic acid is a DNA molecule. In some embodiments of any of the cells described herein, the target nucleic acid includes a PAM sequence.

[0132] In some embodiments of any of the cells described herein, the CRISPR-associated protein has non-specific nuclease activity.

[0133] In some embodiments of any of the cells described herein, recognition of the target nucleic acid by the CRISPR-associated protein and RNA guide results in a modification of the target nucleic acid. In some embodiments of any of the cells described herein, the modification of the target nucleic acid is a double-stranded cleavage event. In some embodiments of any of the cells described herein, the modification of the target nucleic acid is a single-stranded cleavage event. In some embodiments of any of the cells described herein, the modification of the target nucleic acid results in an insertion event. In some embodiments of any of the cells described herein, the modification of the target nucleic acid results in a deletion event. In some embodiments of any of the cells described herein, the modification of the target nucleic acid results in cell toxicity or cell death.

[0134] In another aspect, the disclosure provides a method of binding a system described herein to a target nucleic acid in a cell comprising: (a) providing the system; and (b) delivering the system to the cell, wherein the cell comprises the target nucleic acid, wherein the CRISPR-associated protein binds to the RNA guide, and wherein the spacer sequence binds to the target nucleic acid. In some embodiments, the cell is a eukaryotic cell, e.g., a mammalian cell, e.g., a human cell.

[0135] In some embodiments of any of the methods described herein, the CRISPR-associated protein comprises a catalytic residue (e.g., aspartic acid or glutamic acid). In some embodiments of any of the methods described herein, the CRISPR-associated protein cleaves the target nucleic acid. In some embodiments of any of the methods described herein, the CRISPR-associated protein further comprises a peptide tag, a fluorescent protein, a base-editing domain, a DNA methylation domain, a histone residue modification domain, a localization factor, a transcription modification factor, a light-gated control factor, a chemically inducible factor, or a chromatin visualization factor.

[0136] In some embodiments of any of the methods described herein, the nucleic acid encoding the CRISPR-associated protein is codon-optimized for expression in a cell, e.g., a eukaryotic cell, e.g., a mammalian cell, e.g., a human cell. In some embodiments, of any of the methods described herein, the cell is a genetically engineered cell. In some embodiments of any of the methods described herein, the nucleic acid encoding the CRISPR-associated protein is operably linked to a promoter. In some embodiments of any of the methods described herein, the nucleic acid encoding the CRISPR-associated protein is in a vector. In some embodiments, the vector comprises a retroviral vector, a lentiviral vector, a phage vector, an adenoviral vector, an adeno-associated vector, or a herpes simplex vector.

[0137] In some embodiments of any of the methods described herein, the system does not include a tracrRNA. In some embodiments of any of the methods described herein, the cell optionally includes a tracrRNA.

[0138] In some embodiments of any of the methods described herein, the RNA guide optionally includes a tracrRNA and/or a modulator RNA. In some embodiments of any of the methods described herein, the system further includes a tracrRNA. In some embodiments of any of the methods described herein, the system further includes a modulator RNA.

[0139] In some embodiments of any of the methods described herein, the target nucleic acid is a DNA molecule. In some embodiments of any of the methods described herein, the target nucleic acid includes a PAM sequence.

[0140] In some embodiments of any of the methods described herein, the CRISPR-associated protein has non-specific nuclease activity.

[0141] In some embodiments of any of the methods described herein, the modification of the target nucleic acid is a double-stranded cleavage event. In some embodiments of any of the methods described herein, the modification of the target nucleic acid is a single-stranded cleavage event. In some embodiments of any of the methods described herein, the modification of the target nucleic acid results in an insertion event. In some embodiments of any of the methods described herein, the modification of the target nucleic acid results in a deletion event. In some embodiments of any of the methods described herein, the modification of the target nucleic acid results in cell toxicity or cell death.

[0142] In another aspect, the disclosure provides a method of editing a target nucleic acid, the method comprising contacting the target nucleic acid with a system described herein. In another aspect, the disclosure provides a method of modifying expression of a target nucleic acid, the method comprising contacting the target nucleic acid with a system described herein. In another aspect, the disclosure provides a method of targeting the insertion of a payload nucleic acid at a site of a target nucleic acid, the method comprising contacting the target nucleic acid with a system described herein. In another aspect, the disclosure provides a method of targeting the excision of a payload nucleic acid from a site at a target nucleic acid, the method comprising contacting the target nucleic acid with a system described herein. In another aspect, the disclosure provides a method of non-specifically degrading single-stranded DNA upon recognition of a DNA target nucleic acid, the method comprising contacting the target nucleic acid with a system described herein.

[0143] In another aspect, the disclosure provides a method of detecting a target nucleic acid in a sample, the method comprising: (a) contacting the sample with a system described herein and a labeled reporter nucleic acid, wherein hybridization of the spacer sequence to the target nucleic acid causes cleavage of the labeled reporter nucleic acid; and (b) measuring a detectable signal produced by cleavage of the labeled reporter nucleic acid, thereby detecting the presence of the target nucleic acid in the sample.

[0144] In some embodiments of any of the systems or methods provided herein, the contacting comprises directly contacting or indirectly contacting. In some embodiments of any of the systems or methods provided herein, contacting indirectly comprises administering one or more nucleic acids encoding an RNA guide or CRISPR-associated protein described herein under conditions that allow for production of the RNA guide and/or CRISPR-related protein. In some embodiments of any of the systems or methods provided herein, contacting includes contacting in vivo or contacting in vitro. In some embodiments of any of the systems or methods provided herein, contacting a target nucleic acid with the system comprises contacting a cell comprising the nucleic acid with the system under conditions that allow the CRISPR-related protein and guide RNA to reach the target nucleic acid. In some embodiments of any of the systems or methods provided herein, contacting a cell in vivo with the system comprises administering the system to the subject that comprises the cell, under conditions that allow the CRISPR-related protein and guide RNA to reach the cell or be produced in the cell.

[0145] In another aspect, the disclosure provides a system provided herein for use in an in vitro or ex vivo method of: (a) targeting and editing a target nucleic acid; (b) non-specifically degrading a single-stranded nucleic acid upon recognition of the nucleic acid; (c) targeting and nicking a non-spacer complementary strand of a double-stranded target upon recognition of a spacer complementary strand of the double-stranded target; (d) targeting and cleaving a double-stranded target nucleic acid; (e) detecting a target nucleic acid in a sample; (f) specifically editing a double-stranded nucleic acid; (g) base editing a double-stranded nucleic acid; (h) inducing genotype-specific or transcriptional-state-specific cell death or dormancy in a cell; (i) creating an indel in a double-stranded nucleic acid target; (j) inserting a sequence into a double-stranded nucleic acid target; or (k) deleting or inverting a sequence in a double-stranded nucleic acid target.

[0146] In some aspects, the present disclosure provides a method of detecting a target nucleic acid in a sample, wherein the method comprises contacting the sample with a system described herein and a labeled reporter nucleic acid, wherein hybridization of the crRNA to the target nucleic acid causes cleavage of the labeled reporter nuclei acid, and measuring a detectable signal produced by cleavage of the labeled reporter nucleic acid, thereby detecting the presence of the target nucleic acid in the sample.

[0147] The effectors described herein provide additional features that include, but are not limited to, 1) novel nucleic acid editing properties and control mechanisms, 2) smaller size for greater versatility in delivery strategies, 3) genotype triggered cellular processes such as cell death, and 4) programmable RNA-guided DNA insertion, excision, and mobilization, and 5) differentiated profile of pre-existing immunity through a non-human commensal source. See, e.g., Examples 1-15 and FIGS. 3-44. Addition of the novel DNA-targeting systems described herein to the toolbox of techniques for genome and epigenome manipulation enables broad applications for specific, programmed perturbations.

[0148] Other features and advantages of the invention will be apparent from the following detailed description and from the claims.

### BRIEF FIGURE DESCRIPTION

[0149] The figures are a series of schematics that represent the results of analysis of a protein cluster referred to as CLUST.133120.

[0150] FIG. 1A is a schematic representation of the components of the in vivo negative selection screening assay described in Examples 2, 5, 10, 12, and 14. CRISPR array libraries were designed including non-representative spacers uniformly sampled from both strands of the pACYC184 or E. coli essential genes flanked by two DRs and expressed by J23119.

[0151] FIG. 1B is a schematic representation of the in vivo negative selection screening workflow described in Example 2. CRISPR array libraries were cloned into the effector plasmid. The effector plasmid and the non-coding plasmid were transformed into E. coli followed by outgrowth for negative selection of CRISPR arrays conferring interference against transcripts from pACYC184 or E. coli essential genes. Targeted sequencing of the effector plasmid was used to identify depleted CRISPR arrays. Small RNAseq was further performed to identify mature crRNAs and potential tracrRNA requirements.

[0152] FIG. 2 is a schematic showing the RuvC and Zn finger domains of CLUST.133120 effectors, which is based upon the consensus sequence of the sequences shown in Table 3.

[0153] FIG. 3 is a graph for CLUST.133120 3300027740 (effector set forth in SEQ ID NO: 1) showing the degree of depletion activity of the engineered compositions for spacers targeting pACYC184 and direct repeat transcriptional orientations. The degree of depletion with the direct repeat in the “forward” orientation (5′-CCAA . . . CGAC-[spacer]-3′) and with the direct repeat in the “reverse” orientation (5′-GTCG . . . TTGG-[spacer]-3′) are depicted.

[0154] FIG. 4A is a graphical representation showing the density of depleted and non-depleted targets for CLUST.133120 3300027740 by location on the pACYC184 plasmid. FIG. 4B is a graphic representation showing the density of depleted and non-depleted targets for CLUST.133120 3300027740 by location on the E. coli strain, E. Cloni. Targets on the top strand and bottom strand are shown separately and in relation to the orientation of the annotated genes. The magnitude of the bands indicates the degree of depletion, wherein the lighter bands are close to the hit threshold of 3. The gradients are heatmaps of RNA sequencing showing relative transcript abundance.

[0155] FIG. 5 is a WebLogo of the sequences flanking depleted targets in E. Cloni as a prediction of the PAM sequence for CLUST.133120 3300027740.

[0156] FIG. 6 is a graph for CLUST.133120 3300017971 (effector set forth in SEQ ID NO: 2) showing the degree of depletion activity of the engineered compositions for spacers targeting pACYC184 and direct repeat transcriptional orientations. The degree of depletion with the direct repeat in the “forward” orientation (5′-GTCG . . . TACC-[spacer]-3′) and with the direct repeat in the “reverse” orientation (5′-GGTA . . . CGAC-[spacer]-3′) are depicted.

[0157] FIG. 7A is a graphical representation showing the density of depleted and non-depleted targets for CLUST.133120 3300017971 by location on the pACYC184 plasmid. FIG. 7B is a graphic representation showing the density of depleted and non-depleted targets for CLUST.133120 3300017971 by location on the E. coli strain, E. Cloni. Targets on the top strand and bottom strand are shown separately and in relation to the orientation of the annotated genes. The magnitude of the bands indicates the degree of depletion, wherein the lighter bands are close to the hit threshold of 3. The gradients are heatmaps of RNA sequencing showing relative transcript abundance.

[0158] FIG. 8 is a WebLogo of the sequences flanking depleted targets in E. Cloni as a prediction of the PAM sequence for CLUST.133120 3300017971.

[0159] FIG. 9 is a graph for CLUST.133120 3300027740 (effector set forth in SEQ ID NO: 1) showing the degree of depletion activity of the engineered compositions for spacers targeting pACYC184 and direct repeat transcriptional orientations, without a non-coding sequence. The degree of depletion with the direct repeat in the “forward” orientation (5′-CCAA . . . CGAC-[spacer]-3′) and with the direct repeat in the “reverse” orientation (5′-GTCG . . . TTGG-[spacer]-3′) are depicted.

[0160] FIG. 10A is a graphical representation showing the density of depleted and non-depleted targets for CLUST.133120 3300027740, without a non-coding sequence, by location on the pACYC184 plasmid. FIG. 10B is a graphic representation showing the density of depleted and non-depleted targets for CLUST.133120 3300027740, without a non-coding sequence, by location on the E. coli strain E. Cloni. Targets on the top strand and bottom strand are shown separately and in relation to the orientation of the annotated genes. The magnitude of the bands indicates the degree of depletion, wherein the lighter bands are close to the hit threshold of 3. The gradients are heatmaps of RNA sequencing showing relative transcript abundance.

[0161] FIG. 11 is a WebLogo of the sequences flanking depleted targets in E. Cloni as a prediction of the PAM sequence for CLUST.133120 3300027740 (without a non-coding sequence).

[0162] FIG. 12 is a graph for CLUST.133120 3300017971 (effector set forth in SEQ ID NO: 2) showing the degree of depletion activity of the engineered compositions for spacers targeting pACYC184 and direct repeat transcriptional orientations, without a non-coding sequence. The degree of depletion with the direct repeat in the “forward” orientation (5′-GTCG . . . TACC-[spacer]-3′) and with the direct repeat in the “reverse” orientation (5′-GGTA . . . CGAC-[spacer]-3′) are depicted.

[0163] FIG. 13A is a graphical representation showing the density of depleted and non-depleted targets for CLUST.133120 3300017971, without a non-coding sequence, by location on the pACYC184 plasmid. FIG. 13B is a graphic representation showing the density of depleted and non-depleted targets for CLUST.133120 3300017971, without a non-coding sequence, by location on the E. coli strain E. Cloni. Targets on the top strand and bottom strand are shown separately and in relation to the orientation of the annotated genes. The magnitude of the bands indicates the degree of depletion, wherein the lighter bands are close to the hit threshold of 3. The gradients are heatmaps of RNA sequencing showing relative transcript abundance.

[0164] FIG. 14 is a WebLogo of the sequences flanking depleted targets in E. Cloni as a prediction of the PAM sequence for CLUST.133120 3300017971 (without a non-coding sequence).

[0165] FIG. 15A is a schematic of the fluorescence depletion assay described in Example 3 to measure CLUST.133120 effector activity. FIG. 15B shows plots of GFP Depletion Ratios (Non-target/target) for the effector of SEQ ID NO: 1 for Target 1 (SEQ ID NO: 82), Target 2 (SEQ ID NO: 83), and Target 3 (SEQ ID NO: 84).

[0166] FIG. 16 is a schematic showing the RuvC domains of CLUST.099129 effectors, which is based upon the consensus sequence of the sequences shown in Table 10.

[0167] FIG. 17 is a graph for CLUST.099129 SRR6837557 (effector set forth in SEQ ID NO: 101) showing the degree of depletion activity of the engineered compositions for spacers targeting pACYC184 and direct repeat transcriptional orientations, with a non-coding sequence. The degree of depletion with the direct repeat in the “forward” orientation (5′-GTTT . . . GACC-[spacer]-3′) and with the direct repeat in the “reverse” orientation (5′-AGTC . . . AAAC-[spacer]-3′) are depicted.

[0168] FIG. 18A is a graphical representation showing the density of depleted and non-depleted targets for CLUST.099129 SRR6837557, with a non-coding sequence, by location on the pACYC184 plasmid. FIG. 18B is a graphic representation showing the density of depleted and non-depleted targets for CLUST.099129 SRR6837557, with a non-coding sequence, by location on the E. coli strain, E. Cloni. Targets on the top strand and bottom strand are shown separately and in relation to the orientation of the annotated genes. The magnitude of the bands indicates the degree of depletion, wherein the lighter bands are close to the hit threshold of 3. The gradients are heatmaps of RNA sequencing showing relative transcript abundance.

[0169] FIG. 19 is a WebLogo of the sequences flanking depleted targets in E. Cloni as a prediction of the PAM sequence for CLUST.099129 SRR6837557 (with a non-coding sequence).

[0170] FIG. 20 is a graph for CLUST.099129 SRR6837557 (effector set forth in SEQ ID NO: 101) showing the degree of depletion activity of the engineered compositions for spacers targeting pACYC184 and direct repeat transcriptional orientations, without a non-coding sequence. The degree of depletion with the direct repeat in the “forward” orientation (5′-GTT . . . GACC-[spacer]-3′) and with the direct repeat in the “reverse” orientation (0.5′-AGTC . . . AAAC-[spacer]-3′) are depicted.

[0171] FIG. 21A is a graphical representation showing the density of depleted and non-depleted targets for CLUST.099129 SRR6837557, without a non-coding sequence, by location on the pACYC184 plasmid. FIG. 21B is a graphic representation showing the density of depleted and non-depleted targets for CLUST.099129 SRR6837557, without a non-coding sequence. by location on the E. coli strain, E. Cloni. Targets on the top strand and bottom strand are shown separately and in relation to the orientation of the annotated genes. The magnitude of the bands indicates the degree of depletion. wherein the lighter bands are close to the hit threshold of 3. The gradients are heatmaps of RNA sequencing showing relative transcript abundance.

[0172] FIG. 22 is a WebLogo of the sequences flanking depleted targets in E. Cloni as a prediction of the PAM sequence for CLUST.099129 SRR6837557 (without a non-coding sequence).

[0173] FIG. 23 is a graph for CLUST.099129 3300012971 (effector set forth in SEQ ID NO: 102) showing the degree of depletion activity of the engineered compositions for spacers targeting pACYC184 and direct repeat transcriptional orientations, with a non-coding sequence. The degree of depletion with the direct repeat in the “forward” orientation 5′-GTGC . . . TCAC-[spacer]-3′) and with the direct repeat in the “reverse” orientation (5′-GTGA . . . GCAC-[spacer]-3′) are depicted.

[0174] FIG. 24A is a graphical representation showing the density of depleted and non-depleted targets for CLUST.099129 3300012971, with a non-coding sequence, by location on the pACYC184 plasmid. FIG. 24B is a graphic representation showing the density of depleted and non-depleted targets for CLUST.099129 3300012971, with a non-coding sequence, by location on the E. coli strain E. Cloni. Targets on the top strand and bottom strand are shown separately and in relation to the orientation of the annotated genes. The magnitude of the bands indicates the degree of depletion, wherein the lighter bands are close to the hit threshold of 3. The gradients are heatmaps of RNA sequencing showing relative transcript abundance.

[0175] FIG. 25 is a WebLogo of the sequences flanking depleted targets in E. Cloni as a prediction of the PAM sequence for CLUST.099129 3300012971 (with a non-coding sequence).

[0176] FIG. 26 is a graph for CLUST.099129 3300005764 (effector set forth in SEQ ID NO: 103) showing the degree of depletion activity of the engineered compositions for spacers targeting pACYC184 and direct repeat transcriptional orientations, with a non-coding sequence. The degree of depletion with the direct repeat in the “forward” orientation (5′-GTGC . . . TACT-[spacer]-3′) and with the direct repeat in the “reverse” orientation (5′-AGTA . . . GCAC-[spacer]-3′) are depicted.

[0177] FIG. 27A is a graphical representation showing the density of depleted and non-depleted targets for CLUST.099129 3300005764, with a non-coding sequence, by location on the pACYC184 plasmid. FIG. 27B is a graphic representation showing the density of depleted and non-depleted targets for CLUST.099129 3300005764, with a non-coding sequence, by location on the E. coli strain E. Cloni. Targets on the top strand and bottom strand are shown separately and in relation to the orientation of the annotated genes. The magnitude of the bands indicates the degree of depletion, wherein the lighter bands are close to the hit threshold of 3. The gradients are heatmaps of RNA sequencing showing relative transcript abundance.

[0178] FIG. 28 is a WebLogo of the sequences flanking depleted targets in E. Cloni as a prediction of the PAM sequence for CLUST.099129 3300005764 (with a non-coding sequence).

[0179] FIG. 29A is a schematic of the fluorescence depletion assay (FDA) described in Example 6 to measure CLUST.099129 effector activity. FIG. 29B shows plots of GFP Depletion Ratios (Non-target/target) for the effector of SEQ ID NO: 101 for Target 1 (SEQ ID NO: 175), Target 2 (SEQ ID NO: 176), Target 3 (SEQ ID NO: 177), Target 4 (SEQ ID NO: 178), and Target 5 (SEQ ID NO: 179).

[0180] FIG. 30A, FIG. 30B, and FIG. 30C are schematics showing the RuvC and Zn finger domains of CLUST.342201 effectors, which are based upon the consensus sequence of the sequences shown in Table 17.

[0181] FIG. 31 is a graph for CLUST.342201 3300006417 (effector set forth in SEQ ID NO: 301) showing the degree of depletion activity of the engineered compositions for spacers targeting pACYC184 and direct repeat transcriptional orientations, with a non-coding sequence. The degree of depletion with the direct repeat in the “forward” orientation (5′-CCAT . . . GAAC-[spacer]-3′) and with the direct repeat in the “reverse” orientation (5′-GTTC . . . ATGG-[spacer]-3′) are depicted.

[0182] FIG. 32A is a graphical representation showing the density of depleted and non-depleted targets for CLUST.342201 3300006417, with a non-coding sequence, by location on the pACYC184 plasmid. FIG. 32B is a graphic representation showing the density of depleted and non-depleted targets for CLUST.342201 3300006417, with a non-coding sequence, by location on the E. coli strain, E. Cloni. Targets on the top strand and bottom strand are shown separately and in relation to the orientation of the annotated genes. The magnitude of the bands indicates the degree of depletion, wherein the lighter bands are close to the hit threshold of 3. The gradients are heatmaps of RNA sequencing showing relative transcript abundance.

[0183] FIG. 33 is a WebLogo of the sequences flanking depleted targets in E. Cloni as a prediction of the PAM sequence for CLUST.342201 3300006417 (with a non-coding sequence).

[0184] FIG. 34 is a schematic showing the RuvC and Zn finger domains of CLUST.195009 effectors, which is based upon the consensus sequence of the sequences shown in TABLE 23.

[0185] FIG. 35 is a graph for CLUST.195009 SRR6201554 (effector set forth in SEQ ID NO: 501) showing the degree of depletion activity of the engineered compositions for spacers targeting pACYC184 and direct repeat transcriptional orientations, with a non-coding sequence. The degree of depletion with the direct repeat in the “forward” orientation (5′-CCAG . . . CGAC-[spacer]-3′) and with the direct repeat in the “reverse” orientation (5′-GTCG . . . CTGG-[spacer]-3′) are depicted.

[0186] FIG. 36A is a graphical representation showing the density of depleted and non-depleted targets for CLUST.195009 SRR6201554, with a non-coding sequence, by location on the pACYC184 plasmid. FIG. 36B is a graphic representation showing the density of depleted and non-depleted targets for CLUST.195009 SRR6201554, with a non-coding sequence, by location on the E. coli strain, E. Cloni. Targets on the top strand and bottom strand are shown separately and in relation to the orientation of the annotated genes. The magnitude of the bands indicates the degree of depletion, wherein the lighter bands are close to the hit threshold of 3. The gradients are heatmaps of RNA sequencing showing relative transcript abundance.

[0187] FIG. 37 is a WebLogo of the sequences flanking depleted targets in E. Cloni as a prediction of the PAM sequence for CLUST.195009 SRR6201554 (with a non-coding sequence).

[0188] FIG. 38 is a graph for CLUST.195009 SRR6201554 (effector set forth in SEQ ID NO: 501) showing the degree of depletion activity of the engineered compositions for spacers targeting pACYC184 and direct repeat transcriptional orientations, without a non-coding sequence. The degree of depletion with the direct repeat in the “forward” orientation (5′-CCAG . . . CGAC-[spacer]-3′) and with the direct repeat in the “reverse” orientation (5′-GTCG . . . CTGG-[spacer]-3′) are depicted.

[0189] FIG. 39A is a graphical representation showing the density of depleted and non-depleted targets for CLUST.195009 SRR6201554, without a non-coding sequence, by location on the pACYC184 plasmid. FIG. 39B is a graphic representation showing the density of depleted and non-depleted targets for CLUST.195009 SRR6201554, without a non-coding sequence, by location on the E. coli strain, E. Cloni. Targets on the top strand and bottom strand are shown separately and in relation to the orientation of the annotated genes. The magnitude of the bands indicates the degree of depletion, wherein the lighter bands are close to the hit threshold of 3. The gradients are heatmaps of RNA sequencing showing relative transcript abundance.

[0190] FIG. 40 is a WebLogo of the sequences flanking depleted targets in E. Cloni as a prediction of the PAM sequence for CLUST.195009 SRR6201554 (without a non-coding sequence).

[0191] FIG. 41 is a schematic representation showing the RuvC and Zn finger domains of CLUST.057059 effectors, which are based upon the consensus sequence of the sequences shown in Table 29.

[0192] FIG. 42 is a graph for CLUST.057059 3300023179 (effector set forth in SEQ ID NO: 601) showing the degree of depletion activity of the engineered compositions for spacers targeting pACYC184 and direct repeat transcriptional orientations, with a non-coding sequence. The degree of depletion with the direct repeat in the “forward” orientation (5′-CTTG . . . AAAC-[spacer]-3′) and with the direct repeat in the “reverse” orientation (5′-GTTT . . . CAAG-[spacer]-3′) are depicted.

[0193] FIG. 43A is a graphical representation showing the density of depleted and non-depleted targets for CLUST.057059 3300023179, with a non-coding sequence, by location on the pACYC184 plasmid. FIG. 43B is a graphic representation showing the density of depleted and non-depleted targets for CLUST.057059 3300023179, with a non-coding sequence, by location on the E. coli strain, E. Cloni. Targets on the top strand and bottom strand are shown separately and in relation to the orientation of the annotated genes. The magnitude of the bands indicates the degree of depletion, wherein the lighter bands are close to the hit threshold of 3. The gradients are heatmaps of RNA sequencing showing relative transcript abundance.

[0194] FIG. 44 is a WebLogo of the sequences flanking depleted targets in E. Cloni as a prediction of the PAM sequence for CLUST.057059 3300023179 (with a non-coding sequence).

### DETAILED DESCRIPTION

[0195] CRISPR-Cas systems, which are naturally diverse, comprise a wide range of activity mechanisms and functional elements that can be harnessed for programmable biotechnologies. In nature, these systems enable efficient defense against foreign DNA and viruses while providing self versus non-self discrimination to avoid self-targeting. In an engineered setting, these systems provide a diverse toolbox of molecular technologies and define the boundaries of the targeting space. The methods described herein have been used to discover additional mechanisms and parameters within single subunit Class 2 effector systems, which expand the capabilities of RNA-programmable nucleic acid manipulation.

[0196] Unless otherwise defined, all technical and scientific terms used herein have the same meaning as commonly understood by one of ordinary skill in the art to which this invention belongs. Although methods and materials similar or equivalent to those described herein can be used in the practice or testing of the present invention, suitable methods and materials are described below. All publications, patent applications, patents, and other references mentioned herein are incorporated by reference in their entirety. In case of conflict, the present specification, including definitions, will control. In addition, the materials, methods, and examples are illustrative only and not intended to be limiting. Applicant reserves the right to alternatively claim any disclosed invention using the transitional phrase “comprising,” “consisting essentially of,” or “consisting of,” according to standard practice in patent law.

[0197] As used herein, the singular forms “a,” “an,” and “the” include plural referents unless the context clearly dictates otherwise. For example, reference to “a nucleic acid” means one or more nucleic acids.

[0198] It is noted that terms like “preferably,” “suitably,” “commonly,” and “typically” are not utilized herein to limit the scope of the claimed invention or to imply that certain features are critical, essential, or even important to the structure or function of the claimed invention. Rather, these terms are merely intended to highlight alternative or additional features that can or cannot be utilized in a particular embodiment of the present invention.

[0199] For the purposes of describing and defining the present invention, it is noted that the term “substantially” is utilized herein to represent the inherent degree of uncertainty that can be attributed to any quantitative comparison, value, measurement, or other representation. The term “substantially” is also utilized herein to represent the degree by which a quantitative representation can vary from a stated reference without resulting in a change in the basic function of the subject matter at issue.

[0200] The term “CRISPR-Cas system,” as used herein, refers to nucleic acids and/or proteins involved in the expression of, or directing the activity of, CRISPR effectors, including sequences encoding CRISPR effectors, RNA guides, and other sequences and transcripts from a CRISPR locus.

[0201] The terms “CRISPR-associated protein,” “CRISPR-Cas effector,” “CRISPR effector,” “effector,” “effector protein,” “CRISPR enzyme,” or the like, as used interchangeably herein, refer to a protein that carries out an enzymatic activity or that binds to a target site on a nucleic acid specified by an RNA guide. In some embodiments, a CRISPR effector has endonuclease activity, nickase activity, and/or exonuclease activity.

[0202] The terms “RNA guide,” “guide RNA,” “gRNA,” and “guide sequence,” as used herein, refer to any RNA molecule that facilitates the targeting of an effector described herein to a target nucleic acid, such as DNA and/or RNA. Exemplary “RNA guides” include, but are not limited to, crRNAs, as well as crRNAs hybridized to or fused to either tracrRNAs and/or modulator RNAs. In some embodiments, an RNA guide includes both a crRNA and a tracrRNA, either fused into a single RNA molecule or as separate RNA molecules. In some embodiments, an RNA guide includes a crRNA and a modulator RNA, either fused into a single RNA molecule or as separate RNA molecules. In some embodiments, an RNA guide includes a crRNA, a tracrRNA, and a modulator RNA, either fused into a single RNA molecule or as separate RNA molecules.

[0203] The terms “CRISPR effector complex,” “effector complex,” or “surveillance complex,” as used herein, refer to a complex containing a CRISPR effector and an RNA guide. A CRISPR effector complex may further comprise one or more accessory proteins. The one or more accessory proteins may be non-catalytic and/or non-target binding.

[0204] The term “CRISPR RNA” or “crRNA” as used herein refers to an RNA molecule comprising a guide sequence used by a CRISPR effector to specifically recognize a nucleic acid sequence. Typically, crRNAs contain a sequence that mediates target recognition and a sequence that forms a duplex with a tracrRNA. A crRNA may comprise a sequence that hybridizes to a tracrRNA. In turn, the crRNA: tracrRNA duplex may bind to a CRISPR effector. As used herein, the term “pre-crRNA” refers to an unprocessed RNA molecule comprising a DR-spacer-DR sequence. As used herein, the term “mature crRNA” refers to a processed form of a pre-crRNA; a mature crRNA may comprise a DR-spacer sequence, wherein the DR is a truncated form of the DR of a pre-crRNA and/or the spacer is a truncated form of the spacer of a pre-crRNA. A crRNA “spacer” sequence is complementary to and capable of partially or completely binding to a nucleic acid target sequence.

[0205] The terms “trans-activating crRNA” or “tracrRNA,” as used herein, refer to an RNA molecule comprising a sequence that forms a structure and/or sequence motif required for a CRISPR effector to bind to a specified target nucleic acid.

[0206] The term “CRISPR array,” as used herein, refers to a nucleic acid (e.g., DNA) segment that comprises CRISPR repeats and spacers, starting with the first nucleotide of the first CRISPR repeat and ending with the last nucleotide of the final (terminal) CRISPR repeat. Typically, each spacer in a CRISPR array is located between two repeats. The terms “CRISPR repeat,” “CRISPR direct repeat,” and “direct repeat,” as used herein, refer to multiple short direct repeating sequences, which show very little or no sequence variation within a CRISPR array.

[0207] The term “modulator RNA” as described herein refers to any RNA molecule that modulates (e.g., increases or decreases) an activity of a CRISPR effector or a nucleoprotein complex that includes a CRISPR effector. In some embodiments, a modulator RNA modulates a nuclease activity of a CRISPR effector or a nucleoprotein complex that includes a CRISPR effector.

[0208] As used herein, the term “target nucleic acid” refers to a nucleic acid that comprises a nucleotide sequence complementary to the entirety or a part of the spacer in an RNA guide. In some embodiments, the target nucleic acid comprises a gene. In some embodiments, the target nucleic acid comprises a non-coding region (e.g., a promoter). In some embodiments, the target nucleic acid is single-stranded. In some embodiments, the target nucleic acid is double-stranded. A “transcriptionally-active site,” as used herein, refers to a site in a nucleic acid sequence being actively transcribed.

[0209] The terms “activated CRISPR effector complex,” “activated CRISPR complex,” and “activated complex,” as used herein, refer to a CRISPR effector complex capable of modifying a target nucleic acid. In some embodiments, an activated CRISPR complex is capable of modifying a target nucleic acid following binding of the activated CRISPR complex to the target nucleic acid. In some embodiments, binding of an activated CRISPR complex to a target nucleic acid results in an additional cleavage event, such as collateral cleavage.

[0210] The term “cleavage event,” as used herein, refers to a break in a nucleic acid, such as DNA and/or RNA. In some embodiments, a cleavage event refers to a break in a target nucleic acid created by a nuclease of a CRISPR system described herein. In some embodiments, the cleavage event is a double-stranded DNA break. In some embodiments, the cleavage event is a single-stranded DNA break. In some embodiments, a cleavage event refers to a break in a collateral nucleic acid.

[0211] The term “collateral nucleic acid,” as used herein, refers to a nucleic acid substrate that is cleaved non-specifically by an activated CRISPR complex. The term “collateral DNase activity,” as used herein in reference to a CRISPR effector, refers to non-specific DNase activity of an activated CRISPR complex. The term “collateral RNase activity,” as used herein in reference to a CRISPR effector, refers to non-specific RNase activity of an activated CRISPR complex.

[0212] The term “donor template nucleic acid,” as used herein, refers to a nucleic acid molecule that can be used to make a templated change to a target sequence or target-proximal sequence after a CRISPR effector described herein has modified the target nucleic acid. In some embodiments, the donor template nucleic acid is a double-stranded nucleic acid. In some embodiments, the donor template nucleic acid is a single-stranded nucleic acid. In some embodiments, the donor template nucleic acid is linear. In some embodiments, the donor template nucleic acid is circular (e.g., a plasmid). In some embodiments, the donor template nucleic acid is an exogenous nucleic acid molecule. In some embodiments, the donor template nucleic acid is an endogenous nucleic acid molecule (e.g., a chromosome).

[0213] As used herein, the terms “polynucleotide,” “nucleotide,” “oligonucleotide,” and “nucleic acid” can be used interchangeably to refer to nucleic acid comprising DNA, RNA, derivatives thereof, or combinations thereof. Methods well known to those skilled in the art can be used to construct genetic expression constructs and recombinant cells according to this invention. These methods include in vitro recombinant DNA techniques, synthetic techniques, in vivo recombination techniques, and polymerase chain reaction (PCR) techniques. See, for example, techniques as described in Maniatis et al., 1989, MOLECULAR CLONING: A LABORATORY MANUAL, Cold Spring Harbor Laboratory, New York; Ausubel et al., 1989, CURRENT PROTOCOLS IN MOLECULAR BIOLOGY, Greene Publishing Associates and Wiley Interscience, New York, and PCR Protocols: A Guide to Methods and Applications (Innis et al., 1990, Academic Press, San Diego, Calif.)

[0214] The term “genetic modification” or “genetic engineering” broadly refers to manipulation of the genome or nucleic acids of a cell. Likewise, the terms “genetically engineered” and “engineered” refer to a cell comprising a manipulated genome or nucleic acids. Methods of genetic modification of include, for example, heterologous gene expression, gene or promoter insertion or deletion, nucleic acid mutation, altered gene expression or inactivation, enzyme engineering, directed evolution, knowledge-based design, random mutagenesis methods, gene shuffling, and codon optimization.

[0215] The term “recombinant” indicates that a nucleic acid, protein, or cell is the product of genetic modification, engineering, or recombination. Generally, the term “recombinant” refers to a nucleic acid, protein, or cell that contains or is encoded by genetic material derived from multiple sources. As used herein, the term “recombinant” may also be used to describe a cell that comprises a mutated nucleic acid or protein, including a mutated form of an endogenous nucleic acid or protein. The terms “recombinant cell” and “recombinant host” can be used interchangeably. In some embodiments, a recombinant cell comprises a CRISPR effector disclosed herein. In some embodiments, the CRISPR effector disclosed herein is self-processing. The CRISPR effector can be codon-optimized for expression in the recombinant cell. In some embodiments, a recombinant cell disclosed herein further comprises an RNA guide. In some embodiments, an RNA guide of a recombinant cell disclosed herein comprises a tracrRNA. In some embodiments, an RNA guide of a recombinant cell disclosed herein does not comprise a tracrRNA. In some embodiments, the recombinant cell is a prokaryotic cell, such as an E. coli cell. In some embodiments, the recombinant cell is a eukaryotic cell, such as a mammalian cell, including a human cell.

[0216] As used herein, the term “protospacer adjacent motif” or “PAM” refers to a DNA sequence adjacent to a target sequence to which a complex comprising an effector and an RNA guide binds. In some embodiments, a PAM is required for enzyme activity. As used herein, the term “adjacent” includes instances in which an RNA guide of the complex specifically binds, interacts, or associates with a target sequence that is immediately adjacent to a PAM. In such instances, there are no nucleotides between the target sequence and the PAM. The term “adjacent” also includes instances in which there are a small number (e.g., 1, 2, 3, 4, or 5) of nucleotides between the target sequence, to which the targeting moiety binds, and the PAM.

### Identification of CLUST.133120, CLUST.099129, CLUST.342201, CLUST.195009, and CLUST.057059

[0217] This application relates to the identification, engineering, and use of novel protein families referred to herein as “CLUST.133120”, “CLUST.099129”, “CLUST.342201”, “CLUST.195009”, and “CLUST.057059.” As shown in FIG. 2, the proteins of CLUST.133120 comprise three RuvC domains (denoted RuvC I, RuvC II, and RuvC III) and a Zn finger domain. As shown in TABLE 2, effectors of CLUST.133120 range in size from about 400 amino acids to about 800 amino acids.

[0218] As shown in FIG. 16, the proteins of CLUST.099129 comprise three RuvC domains (denoted RuvC I, RuvC II, and RuvC III). As shown in TABLE 9, effectors of CLUST.099129 range in size from about 500 amino acids to about 700 amino acids.

[0219] As shown in FIG. 30A, FIG. 30B, and FIG. 30C, the proteins of CLUST.342201 comprise a RuvC domain (denoted RuvC I, RuvC II, and RuvC III) and a Zn finger domain. As shown in TABLE 16. effectors of CLUST.342201 range in size from about 300 to about 650 amino acids. In some embodiments. CLUST.342201 effectors of about 600 amino acids (e.g., effectors having amino acid sequences set forth in SEQ ID NOs: 334-336, 338, or 339) have an architecture as depicted in FIG. 30A. In some embodiments, CLUST.342201 effectors of about 400 amino acids or less than about 400 amino acids have an architecture as depicted in FIG. 30B or FIG. 30C. For example, effectors having sequences set forth in SEQ ID NOs: 302, 303, 308, 309, 310, 311, 316, 324, 325, 330, 331, and 337 may have an architecture as depicted in FIG. 30B, and effectors having sequences set forth in SEQ ID NOs: 301, 304, 306, 307, 312-315, 317-319, 326-329, 332, 333, 340, or 341 may have an architecture as depicted in FIG. 30C. Thus, CLUST.342201 effectors of about 400 amino acids or less than about 400 amino acids have a RuvC III domain at the C-terminus of the effector.

[0220] As shown in FIG. 34, the proteins of CLUST.195009 comprise a RuvC domain (denoted RuvC I, RuvC II, and RuvC III) and a Zn finger domain. As shown in TABLE 22, effectors of CLUST.195009 range in size from about 450 amino acids to about 600 amino acids.

[0221] As shown in FIG. 41, the proteins of CLUST.057059 comprise a RuvC domain (denoted RuvC I, RuvC II, and RuvC III) and a Zn finger domain. As shown in TABLE 28, effectors of CLUST.057059 range in size from about 350 to about 700 amino acids.

[0222] Therefore, the effectors of CLUST.133120, CLUST.099129, CLUST.342201, CLUST.195009, and CLUST.057059 are significantly smaller than effectors known in the art, as shown below. See, e.g., TABLE 1.

TABLE 1
Sizes of known CRISPR-Cas system effectors.

| Effector | Size (aa) |
|---|---|
| StCas9 | 1128 |
| SpCas9 | 1368 |
| SaCas9 | 1053 |
| FnCpf1 | 1300 |
| AsCpf1 | 1307 |
| LbCpf1 | 1246 |
| C2c1 | 1127 (average) |
| CasX | 982 (average) |
| CasY | 1189 (average) |
| C2c2 | 1232 (average) |

[0223] The effectors of CLUST.133120, CLUST.099129, CLUST.342201, CLUST.195009, and CLUST.057059 were identified using computational methods and algorithms to search for and identify proteins exhibiting a strong co-occurrence pattern with certain other features. In certain embodiments, these computational methods were directed to identifying proteins that co-occurred in close proximity to CRISPR arrays. The methods disclosed herein are also useful in identifying proteins that naturally occur within close proximity to other features, both non-coding and protein-coding (e.g., fragments of phage sequences in non-coding areas of bacterial loci or CRISPR Cas1 proteins). It is understood that the methods and calculations described herein may be performed on one or more computing devices.

[0224] Sets of genomic sequences were obtained from genomic or metagenomic databases. The databases comprised short reads, or contig level data, or assembled scaffolds, or complete genomic sequences of organisms. Likewise, the databases may comprise genomic sequence data from prokaryotic organisms, or eukaryotic organisms, or may include data from metagenomic environmental samples. Examples of database repositories include the National Center for Biotechnology Information (NCBI) RefSeq, NCBI GenBank, NCBI Whole Genome Shotgun (WGS), and the Joint Genome Institute (JGI) Integrated Microbial Genomes (IMG).

[0225] In some embodiments, a minimum size requirement is imposed to select genome sequence data of a specified minimum length. In certain exemplary embodiments, the minimum contig length may be 100 nucleotides, 500 nt, 1 kb, 1.5 kb, 2 kb, 3 kb, 4 kb, 5 kb, 10 kb, 20 kb, 40 kb, or 50 kb.

[0226] In some embodiments, known or predicted proteins are extracted from the complete or a selected set of genome sequence data. In some embodiments, known or predicted proteins are taken from extracting coding sequence (CDS) annotations provided by the source database. In some embodiments, predicted proteins are determined by applying a computational method to identify proteins from nucleotide sequences. In some embodiments, the GeneMark Suite is used to predict proteins from genome sequences. In some embodiments, Prodigal is used to predict proteins from genome sequences. In some embodiments, multiple protein prediction algorithms may be used over the same set of sequence data with the resulting set of proteins de-duplicated.

[0227] In some embodiments, CRISPR arrays are identified from the genome sequence data. In some embodiments, PILER-CR is used to identify CRISPR arrays. In some embodiments, CRISPR Recognition Tool (CRT) is used to identify CRISPR arrays. In some embodiments, CRISPR arrays are identified by a heuristic that identifies nucleotide motifs repeated a minimum number of times (e.g., 2, 3, or 4 times), where the spacing between consecutive occurrences of a repeated motif does not exceed a specified length (e.g., 50, 100, or 150 nucleotides). In some embodiments, multiple CRISPR array identification tools may be used over the same set of sequence data with the resulting set of CRISPR arrays de-duplicated.

[0228] In some embodiments, proteins in close proximity to CRISPR arrays (referred to herein as “CRISPR-proximal protein clusters”) are identified. In some embodiments, proximity is defined as a nucleotide distance, and may be within 20 kb, 15 kb, or 5 kb. In some embodiments, proximity is defined as the number of open reading frames (ORFs) between a protein and a CRISPR array, and certain exemplary distances may be 10, 5, 4, 3, 2, 1, or 0 ORFs. The proteins identified as being within close proximity to a CRISPR array are then grouped into clusters of homologous proteins. In some embodiments, blastclust is used to form CRISPR-proximal protein clusters. In certain other embodiments, mmseqs2 is used to form CRISPR-proximal protein clusters.

[0229] To establish a pattern of strong co-occurrence between the members of a CRISPR-proximal protein cluster, a BLAST search of each member of the protein cluster may be performed over the complete set of known and predicted proteins previously compiled. In some embodiments, UBLAST or mmseqs2 may be used to search for similar proteins. In some embodiments, a search may be performed only for a representative subset of proteins in the family.

[0230] In some embodiments, the CRISPR-proximal protein clusters are ranked or filtered by a metric to determine co-occurrence. One exemplary metric is the ratio of the number of elements in a protein cluster against the number of BLAST matches up to a certain E value threshold. In some embodiments, a constant E value threshold may be used. In other embodiments, the E value threshold may be determined by the most distant members of the protein cluster. In some embodiments, the global set of proteins is clustered and the co-occurrence metric is the ratio of the number of elements of the CRISPR-proximal protein cluster against the number of elements of the containing global cluster(s).

[0231] In some embodiments, a manual review process is used to evaluate the potential functionality and the minimal set of components of an engineered system based on the naturally occurring locus structure of the proteins in the cluster. In some embodiments, a graphical representation of the protein cluster may assist in the manual review and may contain information including pairwise sequence similarity, phylogenetic tree, source organisms/environments, predicted functional domains, and a graphical depiction of locus structures. In some embodiments, the graphical depiction of locus structures may filter for nearby protein families that have a high representation. In some embodiments, representation may be calculated by the ratio of the number of related nearby proteins against the size(s) of the containing global cluster(s). In certain exemplary embodiments, the graphical representation of the protein cluster may contain a depiction of the CRISPR array structures of the naturally occurring loci. In some embodiments, the graphical representation of the protein cluster may contain a depiction of the number of conserved direct repeats versus the length of the putative CRISPR array or the number of unique spacer sequences versus the length of the putative CRISPR array. In some embodiments, the graphical representation of the protein cluster may contain a depiction of various metrics of co-occurrence of the putative effector with CRISPR arrays predict new CRISPR-Cas systems and identify their components.

### Pooled-Screening of CLUST.133120, CLUST.099129, CLUST.342201, CLUST.195009, and CLUST.057059

[0232] To efficiently validate the activity, mechanisms, and functional parameters of the engineered CLUST.133120 CRISPR-Cas systems identified herein, a pooled-screening approach in E. coli was used, as described in Example 2.

[0233] To efficiently validate the activity, mechanisms, and functional parameters of the engineered CLUST.099129 CRISPR-Cas systems identified herein, a pooled-screening approach in E. coli was used, as described in Example 5.

[0234] To efficiently validate the activity, mechanisms, and functional parameters of the engineered CLUST.342201 CRISPR-Cas systems identified herein, a pooled-screening approach in E. coli was used, as described in Example 10.

[0235] To efficiently validate the activity, mechanisms, and functional parameters of the engineered CLUST.195009 CRISPR-Cas systems identified herein, a pooled-screening approach in E. coli was used, as described in Example 12.

[0236] To efficiently validate the activity, mechanisms, and functional parameters of the engineered CLUST.057059 CRISPR-Cas systems identified herein, a pooled-screening approach in E. coli was used, as described in Example 14.

[0237] First, from the computational identification of the conserved protein and noncoding elements of the CLUST.133120, CLUST.099129, CLUST.342201, CLUST.195009, and CLUST.057059 CRISPR-Cas systems, DNA synthesis and molecular cloning were used to assemble the separate components into a single artificial expression vector, which in one embodiment is based on a pET-28a+ backbone. In a second embodiment, the effectors and noncoding elements are transcribed on an mRNA transcript, and different ribosomal binding sites are used to translate individual effectors.

[0238] Second, the natural crRNA and targeting spacers were replaced with a library of unprocessed crRNAs containing non-natural spacers targeting a second plasmid, pACYC184. This crRNA library was cloned into the vector backbone comprising the effectors and noncoding elements (e.g., pET-28a+), and the library was subsequently transformed into E. coli along with the pACYC184 plasmid target. Consequently, each resulting E. coli cell contains no more than one targeting array. In an alternate embodiment, the library of unprocessed crRNAs containing non-natural spacers additionally target E. coli essential genes, drawn from resources such as those described in Baba et al. (2006) Mol. Syst. Biol. 2: 2006.0008; and Gerdes et al. (2003) J. Bacteriol. 185(19): 5673-84, the entire contents of each of which are incorporated herein by reference. In this embodiment, positive, targeted activity of the novel CRISPR-Cas systems that disrupts essential gene function results in cell death or growth arrest. In some embodiments, the essential gene targeting spacers can be combined with the pACYC184 targets.

[0239] Third, the E. coli were grown under antibiotic selection. In one embodiment, triple antibiotic selection is used: kanamycin for ensuring successful transformation of the pET-28a+ vector containing the engineered CRISPR effector system and chloramphenicol and tetracycline for ensuring successful co-transformation of the pACYC184 target vector. Since pACYC184 normally confers resistance to chloramphenicol and tetracycline, under antibiotic selection, positive activity of the novel CRISPR-Cas system targeting the plasmid will eliminate cells that actively express the effectors, noncoding elements, and specific active elements of the crRNA library. Typically, populations of surviving cells are analyzed 12-14 h post-transformation. In some embodiments, analysis of surviving cells is conducted 6-8 h post-transformation, 8-12 h post-transformation, up to 24 h post-transformation, or more than 24 h post-transformation. Examining the population of surviving cells at a later time point compared to an earlier time point results in a depleted signal compared to the inactive crRNAs.

[0240] In some embodiments, double antibiotic selection is used. Withdrawal of either chloramphenicol or tetracycline to remove selective pressure can provide novel information about the targeting substrate, sequence specificity, and potency. For example, cleavage of dsDNA in a selected or unselected gene can result in negative selection in E. coli, wherein depletion of both selected and unselected genes is observed. If the CRISPR-Cas system interferes with transcription or translation (e.g., by binding or by transcript cleavage), then selection will only be observed for targets in the selected resistance gene, rather than in the unselected resistance gene.

[0241] In some embodiments, only kanamycin is used to ensure successful transformation of the pET-28a+ vector comprising the engineered CRISPR-Cas system. This embodiment is suitable for libraries containing spacers targeting E. coli essential genes, as no additional selection beyond kanamycin is needed to observe growth alterations. In this embodiment, chloramphenicol and tetracycline dependence is removed, and their targets (if any) in the library provide an additional source of negative or positive information about the targeting substrate, sequence specificity, and potency.

[0242] Since the pACYC184 plasmid contains a diverse set of features and sequences that may affect the activity of a CRISPR-Cas system, mapping the active crRNAs from the pooled screen onto pACYC184 provides patterns of activity that can be suggestive of different activity mechanisms and functional parameters. In this way, the features required for reconstituting the novel CRISPR-Cas system in a heterologous prokaryotic species can be more comprehensively tested and studied.

[0243] The key advantages of the in vivo pooled-screen described herein include:

[0244] (1) Versatility—Plasmid design allows multiple effectors and/or noncoding elements to be expressed; library cloning strategy enables both transcriptional directions of the computationally predicted crRNA to be expressed;

[0245] (2) Comprehensive tests of activity mechanisms & functional parameters—Evaluates diverse interference mechanisms, including nucleic acid cleavage; examines co-occurrence of features such as transcription, plasmid DNA replication; and flanking sequences for crRNA library can be used to reliably determine PAMs with complexity equivalence of 4N's;

[0246] (3) Sensitivity—pACYC184 is a low copy plasmid, enabling high sensitivity for CRISPR-Cas activity since even modest interference rates can eliminate the antibiotic resistance encoded by the plasmid; and

[0247] (4) Efficiency—Optimized molecular biology steps to enable greater speed and throughput RNA-sequencing and protein expression samples can be directly harvested from the surviving cells in the screen.

[0248] The novel CLUST.133120, CLUST.099129, CLUST.342201, CLUST.195009, and CLUST.057059 CRISPR-Cas families described herein were evaluated using this in vivo pooled-screen to evaluate their operational elements, mechanisms, and parameters, as well as their ability to be active and reprogrammed in an engineered system outside of its endogenous cellular environment.

### CRISPR Effector Activity and Modifications

[0249] In some embodiments, a CRISPR effector of CLUST.133120, CLUST.099129, CLUST.342201, CLUST.195009, or CLUST.057059 and an RNA guide form a “binary” complex that may include other components. The binary complex is activated upon binding to a nucleic acid substrate that is complementary to a spacer sequence in the RNA guide (i.e., a sequence-specific substrate or target nucleic acid). In some embodiments, the sequence-specific substrate is a double-stranded DNA. In some embodiments, the sequence-specific substrate is a single-stranded DNA. In some embodiments, the sequence-specific substrate is a single-stranded RNA. In some embodiments, the sequence-specific substrate is a double-stranded RNA. In some embodiments, the sequence-specificity requires a complete match of the spacer sequence in the RNA guide (e.g., crRNA) to the target substrate. In other embodiments, the sequence specificity requires a partial (contiguous or non-contiguous) match of the spacer sequence in the RNA guide (e.g., crRNA) to the target substrate.

[0250] In some embodiments, the binary complex becomes activated upon binding to the target substrate. In some embodiments, the activated complex exhibits “multiple turnover” activity, whereby upon acting on (e.g., cleaving) the target substrate the activated complex remains in an activated state. In some embodiments, the activated binary complex exhibits “single turnover” activity, whereby upon acting on the target substrate the binary complex reverts to an inactive state. In some embodiments, the activated binary complex exhibits non-specific (i.e., “collateral”) cleavage activity whereby the complex cleaves non-target nucleic acids. In some embodiments, the non-target nucleic acid is a DNA molecule (e.g., a single-stranded or a double-stranded DNA). In some embodiments, the non-target nucleic acid is an RNA molecule (e.g., a single-stranded or a double-stranded RNA).

[0251] In some embodiments, a CRISPR effector described herein can be fused to one or more peptide tags, including a His-tag, GST-tag, FLAG-tag, or myc-tag. In some embodiments, a CRISPR effector described herein can be fused to a detectable moiety such as a fluorescent protein (e.g., green fluorescent protein or yellow fluorescent protein). In some embodiments, a CRISPR effector and/or accessory protein of this disclosure is fused to a peptide or non-peptide moiety that allows the protein to enter or localize to a tissue, a cell, or a region of a cell. For instance, a CRISPR effector of this disclosure may comprise a nuclear localization sequence (NLS) such as an SV40 (simian virus 40) NLS, c-Myc NLS, or other suitable monopartite NLS. The NLS may be fused to the N-terminus and/or C-terminus of the CRISPR effector, and may be fused singly (i.e., a single NLS) or concatenated (e.g., a chain of 2, 3, 4, etc. NLS).

[0252] In some embodiments, at least one Nuclear Export Signal (NES) is attached to a nucleic acid sequences encoding the CRISPR effector. In some embodiments, a C-terminal and/or N-terminal NLS or NES is attached for optimal expression and nuclear targeting in eukaryotic cells, e.g., human cells.

[0253] In those embodiments where a tag is fused to a CRISPR effector, such tag may facilitate affinity-based or charge-based purification of the CRISPR effector, e.g., by liquid chromatography or bead separation utilizing an immobilized affinity or ion-exchange reagent. As a non-limiting example, a recombinant CRISPR effector of this disclosure comprises a polyhistidine (His) tag, and for purification is loaded onto a chromatography column comprising an immobilized metal ion (e.g. a Zn²⁺, Ni²⁺, Cu²⁺ ion chelated by a chelating ligand immobilized on the resin, which resin may be an individually prepared resin or a commercially available resin or ready to use column such as the HisTrap FF column commercialized by GE Healthcare Life Sciences, Marlborough, Mass. Following the loading step, the column is optionally rinsed, e.g., using one or more suitable buffer solutions, and the His-tagged protein is then eluted using a suitable elution buffer. Alternatively, or additionally, if the recombinant CRISPR effector of this disclosure utilizes a FLAG-tag, such protein may be purified using immunoprecipitation methods known in the industry. Other suitable purification methods for tagged CRISPR effectors or accessory proteins of this disclosure will be evident to those of skill in the art.

[0254] The proteins described herein (e.g., CRISPR effectors or accessory proteins) can be delivered or used as either nucleic acid molecules or polypeptides. When nucleic acid molecules are used, the nucleic acid molecule encoding the CRISPR effector can be codon-optimized. The nucleic acid can be codon optimized for use in any organism of interest, in particular human cells or bacteria. For example, the nucleic acid can be codon-optimized for any non-human eukaryote including mice, rats, rabbits, dogs, livestock, or non-human primates. Codon usage tables are readily available, for example, at the “Codon Usage Database” available at www.kazusa.orjp/codon/and these tables can be adapted in a number of ways. See Nakamura et al. Nucl. Acids Res. 28:292 (2000), which is incorporated herein by reference in its entirety. Computer algorithms for codon optimizing a particular sequence for expression in a particular host cell are also available, such as Gene Forge (Aptagen; Jacobus, Pa.).

[0255] In some instances, nucleic acids of this disclosure which encode CRISPR effectors for expression in eukaryotic (e.g., human, or other mammalian cells) cells include one or more introns, i.e., one or more non-coding sequences comprising, at a first end (e.g., a 5′ end), a splice-donor sequence and, at second end (e.g., the 3′ end) a splice acceptor sequence. Any suitable splice donor/splice acceptor can be used in the various embodiments of this disclosure, including without limitation simian virus 40 (SV40) intron, beta-globin intron, and synthetic introns. Alternatively, or additionally, nucleic acids of this disclosure encoding CRISPR effectors or accessory proteins may include, at a 3′ end of a DNA coding sequence, a transcription stop signal such as a polyadenylation (polyA) signal. In some instances, the polyA signal is located in close proximity to, or adjacent to, an intron such as the SV40 intron.

[0256] Deactivated/Inactivated CRISPR Effectors

[0257] The CRISPR effectors described herein can be modified to have diminished nuclease activity, e.g., nuclease inactivation of at least 50%, at least 60%, at least 70%, at least 80%, at least 90%, at least 95%, at least 97%, or 100% as compared with the wild type CRISPR effectors. The nuclease activity can be diminished by several methods known in the art, e.g., introducing mutations into the nuclease domains of the proteins. In some embodiments, catalytic residues for the nuclease activities are identified, and these amino acid residues can be substituted by different amino acid residues (e.g., glycine or alanine) to diminish the nuclease activity.

[0258] The inactivated CRISPR effectors can comprise or be associated with one or more functional domains (e.g., via fusion protein, linker peptides, “GS” linkers, etc.). These functional domains can have various activities, e.g., methylase activity, demethylase activity, transcription activation activity, transcription repression activity, transcription release factor activity, histone modification activity, RNA cleavage activity, DNA cleavage activity, nucleic acid binding activity, and switch activity (e.g., light inducible). In some embodiments, the functional domains are Krappel associated box (KRAB), VP64, VP16, Fok1, P65, HSF1, MyoD1, and biotin-APEX.

[0259] The positioning of the one or more functional domains on the inactivated CRISPR effectors is one that allows for correct spatial orientation for the functional domain to affect the target with the attributed functional effect. For example, if the functional domain is a transcription activator (e.g., VP16, VP64, or p65), the transcription activator is placed in a spatial orientation that allows it to affect the transcription of the target. Likewise, a transcription repressor is positioned to affect the transcription of the target, and a nuclease (e.g., Fok1) is positioned to cleave or partially cleave the target. In some embodiments, the functional domain is positioned at the N-terminus of the CRISPR effector. In some embodiments, the functional domain is positioned at the C-terminus of the CRISPR effector. In some embodiments, the inactivated CRISPR effector is modified to comprise a first functional domain at the N-terminus and a second functional domain at the C-terminus.

[0260] Split Enzymes

[0261] The present disclosure also provides a split version of the CRISPR effectors described herein. The split version of the CRISPR effectors may be advantageous for delivery. In some embodiments, the CRISPR effectors are split to two parts of the enzymes, which together substantially comprises a functioning CRISPR effector.

[0262] The split can be done in a way that the catalytic domain(s) are unaffected. The CRISPR effectors may function as a nuclease or may be inactivated enzymes, which are essentially RNA-binding proteins with very little or no catalytic activity (e.g., due to mutation(s) in its catalytic domains).

[0263] In some embodiments, the nuclease lobe and α-helical lobe are expressed as separate polypeptides. Although the lobes do not interact on their own, the RNA guide recruits them into a ternary complex that recapitulates the activity of full-length CRISPR effectors and catalyzes site-specific DNA cleavage. The use of a modified RNA guide abrogates split-enzyme activity by preventing dimerization, allowing for the development of an inducible dimerization system. The split enzyme is described, e.g., in Wright et al. “Rational design of a split-Cas9 enzyme complex,” Proc. Natl. Acad. Sci., 112.10 (2015): 2984-2989, which is incorporated herein by reference in its entirety.

[0264] In some embodiments, the split enzyme can be fused to a dimerization partner, e.g., by employing rapamycin sensitive dimerization domains. This allows the generation of a chemically inducible CRISPR effector for temporal control of CRISPR effector activity. The CRISPR effector can thus be rendered chemically inducible by being split into two fragments, and rapamycin-sensitive dimerization domains can be used for controlled reassembly of the CRISPR effector.

[0265] The split point is typically designed in silico and cloned into the constructs. During this process, mutations can be introduced to the split enzyme and non-functional domains can be removed. In some embodiments, the two parts or fragments of the split CRISPR effector (i.e., the N-terminal and C-terminal fragments) can form a full CRISPR effector, comprising, e.g., at least 70%, at least 80%, at least 90%, at least 95%, or at least 99% of the sequence of the wild-type CRISPR effector.

[0266] Self-Activating or Inactivating Enzymes

[0267] The CRISPR effectors described herein can be designed to be self-activating or self-inactivating. In some embodiments, the CRISPR effectors are self-inactivating. For example, the target sequence can be introduced into the CRISPR effector coding constructs. Thus, the CRISPR effectors can cleave the target sequence, as well as the construct encoding the enzyme thereby self-inactivating their expression. Methods of constructing a self-inactivating CRISPR system is described, e.g., in Epstein et al., “Engineering a Self-Inactivating CRISPR System for AAV Vectors,” Mol. Ther., 24 (2016): S50, which is incorporated herein by reference in its entirety.

[0268] In some other embodiments, an additional RNA guide, expressed under the control of a weak promoter (e.g., 7SK promoter), can target the nucleic acid sequence encoding the CRISPR effector to prevent and/or block its expression (e.g., by preventing the transcription and/or translation of the nucleic acid). The transfection of cells with vectors expressing the CRISPR effector, RNA guides, and RNA guides that target the nucleic acid encoding the CRISPR effector can lead to efficient disruption of the nucleic acid encoding the CRISPR effector and decrease the levels of CRISPR effector, thereby limiting the genome editing activity.

[0269] In some embodiments, the genome editing activity of a CRISPR effector can be modulated through endogenous RNA signatures (e.g., miRNA) in mammalian cells. The CRISPR effector switch can be made by using a miRNA-complementary sequence in the 5′-UTR of mRNA encoding the CRISPR effector. The switches selectively and efficiently respond to miRNA in the target cells. Thus, the switches can differentially control the genome editing by sensing endogenous miRNA activities within a heterogeneous cell population. Therefore, the switch systems can provide a framework for cell-type selective genome editing and cell engineering based on intracellular miRNA information (Hirosawa et al. “Cell-type-specific genome editing with a microRNA-responsive CRISPR-Cas9 switch,” Nucl. Acids Res., 2017 Jul. 27; 45(13): e118).

[0270] Inducible CRISPR Effectors

[0271] The CRISPR effectors can be inducible, e.g., light inducible or chemically inducible. This mechanism allows for activation of the functional domain in a CRISPR effector. Light inducibility can be achieved by various methods known in the art, e.g., by designing a fusion complex wherein CRY2 PHR/CIBN pairing is used in split CRISPR effectors (see, e.g., Konermann et al., “Optical control of mammalian endogenous transcription and epigenetic states,” Nature, 500.7463 (2013): 472). Chemical inducibility can be achieved, e.g., by designing a fusion complex wherein FKBP/FRB (FK506 binding protein/FKBP rapamycin binding domain) pairing is used in split CRISPR effectors. Rapamycin is required for forming the fusion complex, thereby activating the CRISPR effectors (see, e.g., Zetsche et al., “A split-Cas9 architecture for inducible genome editing and transcription modulation,” Nature Biotech., 33.2 (2015): 139-142).

[0272] Furthermore, expression of a CRISPR effector can be modulated by inducible promoters, e.g., tetracycline or doxycycline controlled transcriptional activation (Tet-On and Tet-Off expression system), hormone inducible gene expression system (e.g., an ecdysone inducible gene expression system), and an arabinose-inducible gene expression system. When delivered as RNA, expression of the RNA targeting effector protein can be modulated via a riboswitch, which can sense a small molecule like tetracycline (see, e.g., Goldfless et al., “Direct and specific chemical control of eukaryotic translation with a synthetic RNA-protein interaction,” Nucl. Acids Res., 40.9 (2012): e64-e64).

[0273] Various embodiments of inducible CRISPR effectors and inducible CRISPR systems are described, e.g., in U.S. Pat. No. 8,871,445, US 20160208243, and WO 2016205764, each of which is incorporated herein by reference in its entirety.

[0274] Functional Mutations

[0275] Various mutations or modifications can be introduced into a CRISPR effector as described herein to improve specificity and/or robustness. In some embodiments, the amino acid residues that recognize the Protospacer Adjacent Motif (PAM) are identified. The CRISPR effectors described herein can be modified further to recognize different PAMs, e.g., by substituting the amino acid residues that recognize PAM with other amino acid residues.

[0276] In some embodiments, the CRISPR effectors can recognize, e.g., 5′-TTN-3′, or 5′-TN-3′ PAM, wherein “N” is any nucleotide.

[0277] In some embodiments, the CRISPR effectors can recognize, e.g., 5′-GTN-3′, 5′-TG-3′, 5′-TR-3′, or 5′-RATG-3′, wherein “N” is any nucleotide and “R” is A or G.

[0278] In some embodiments, the CRISPR effectors can recognize, e.g., 5′-AAG-3′, 5′-AAD-3′, 5′-AAR-3′, 5′-RAAG-3′ (SEQ ID NO: 921), 5′-RAAR-3′ (SEQ ID NO: 922), 5′-RAAD-3′ (SEQ ID NO: 923), wherein “D” is A, G, or T, and “R” is A or G.

[0279] In some embodiments, the CRISPR effectors can recognize, e.g., 5′-TTN-3′, wherein “N” is any nucleotide.

[0280] In some embodiments, the CRISPR effectors can recognize, e.g., 5′-GTN-3′, wherein “N” is any nucleotide.

[0281] In some embodiments, the CRISPR effectors described herein can be mutated at one or more amino acid residue to modify one or more functional activities. For example, in some embodiments, the CRISPR effector is mutated at one or more amino acid residues to modify its helicase activity. In some embodiments, the CRISPR effector is mutated at one or more amino acid residues to modify its nuclease activity (e.g., endonuclease activity or exonuclease activity). In some embodiments, the CRISPR effector is mutated at one or more amino acid residues to modify its ability to functionally associate with an RNA guide. In some embodiments, the CRISPR effector is mutated at one or more amino acid residues to modify its ability to functionally associate with a target nucleic acid.

[0282] In some embodiments, the CRISPR effectors described herein are capable of cleaving a target nucleic acid molecule. In some embodiments, the CRISPR effector cleaves both strands of the target nucleic acid molecule. However, in some embodiments, the CRISPR effector is mutated at one or more amino acid residues to modify its cleaving activity. For example, in some embodiments, the CRISPR effector may comprise one or more mutations that increase the ability of the CRISPR effector to cleave a target nucleic acid. In another example, in some embodiments, the CRISPR effector may comprise one or more mutations that render the enzyme incapable of cleaving a target nucleic acid. In other embodiments, the CRISPR effector may comprise one or more mutations such that the enzyme is capable of cleaving a strand of the target nucleic acid (i.e., nickase activity). In some embodiments, the CRISPR effector is capable of cleaving the strand of the target nucleic acid that is complementary to the strand that the RNA guide hybridizes to. In some embodiments, the CRISPR effector is capable of cleaving the strand of the target nucleic acid that the RNA guide hybridizes to.

[0283] In some embodiments, one or more residues of a CRISPR effector disclosed herein are mutated to an arginine moiety. In some embodiments, one or more residues of a CRISPR effector disclosed herein are mutated to a glycine moiety. In some embodiments, one or more residues of a CRISPR effector disclosed herein are mutated based upon consensus residues of a phylogenetic alignment of CRISPR effectors disclosed herein.

[0284] In some embodiments, a CRISPR effector described herein may be engineered to comprise a deletion in one or more amino acid residues to reduce the size of the enzyme while retaining one or more desired functional activities (e.g., nuclease activity and the ability to interact functionally with an RNA guide). The truncated CRISPR effector may be used advantageously in combination with delivery systems having load limitations.

[0285] In one aspect, the present disclosure provides nucleic acid sequences that are at least 10%, 15%, 20%, 25%, 30%, 35%, 40%, 45%, 50%, 55%, 60%, 65%, 70%, 75%, 80%, 85%, 90%, 91%, 92%, 93%, 94%, 95%, 96%, 97%, 98%, or 99% identical to the nucleic sequences described herein (e.g., in any of SEQ ID NOS: 1-50), while maintaining the domain architecture shown in FIG. 2. In another aspect, the present disclosure also provides amino acid sequences that are at least 10%, 15%, 20%, 25%, 30%, 35%, 40%, 45%, 50%, 55%, 60%, 65%, 70%, 75%, 80%, 85%, 90%, 91%, 92%, 93%, 94%, 95%, 96%, 97%, 98%, or 99% identical to the amino acid sequences described herein, while maintaining the domain architecture shown in FIG. 2.

[0286] In one aspect, the present disclosure provides nucleic acid sequences that are at least 10%, 15%, 20%, 25%, 30%, 35%, 40%, 45%, 50%, 55%, 60%, 65%, 70%, 75%, 80%, 85%, 90%, 91%, 92%, 93%, 94%, 95%, 96%, 97%, 98%, or 99% identical to the nucleic sequences described herein (e.g., in any of SEQ ID NOS: 101-145), while maintaining the domain architecture shown in FIG. 16. In another aspect, the present disclosure also provides amino acid sequences that are at least 10%, 15%, 20%, 25%, 30%, 35%, 40%, 45%, 50%, 55%, 60%, 65%, 70%, 75%, 80%, 85%, 90%, 91%, 92%, 93%, 94%, 95%, 96%, 97%, 98%, or 99% identical to the amino acid sequences described herein, while maintaining the domain architecture shown in FIG. 16.

[0287] In one aspect, the present disclosure provides nucleic acid sequences that are at least 10%, 15%, 20%, 25%, 30%, 35%, 40%, 45%, 50%, 55%, 60%, 65%, 70%, 75%, 80%, 85%, 90%, 91%, 92%, 93%, 94%, 95%, 96%, 97%, 98%, or 99% identical to the nucleic sequences described herein (e.g., in any of SEQ ID NOS: 301-341), while maintaining the domain architecture shown in FIG. 30A, FIG. 30B, or FIG. 30C. In another aspect, the present disclosure also provides amino acid sequences that are at least 10%, 15%, 20%, 25%, 30%, 35%, 40%, 45%, 50%, 55%, 60%, 65%, 70%, 75%, 80%, 85%, 90%, 91%, 92%, 93%, 94%, 95%, 96%, 97%, 98%, or 99% identical to the amino acid sequences described herein, while maintaining the domain architecture shown in FIG. 30A, FIG. 30B, or FIG. 30C.

[0288] In one aspect, the present disclosure provides nucleic acid sequences that are at least 10%, 15%, 20%, 25%, 30%, 35%, 40%, 45%, 50%, 55%, 60%, 65%, 70%, 75%, 80%, 85%, 90%, 91%, 92%, 93%, 94%, 95%, 96%, 97%, 98%, or 99% identical to the nucleic sequences described herein (e.g., in any of SEQ ID NOS: 501-521), while maintaining the domain architecture shown in FIG. 34. In another aspect, the present disclosure also provides amino acid sequences that are at least 10%, 15%, 20%, 25%, 30%, 35%, 40%, 45%, 50%, 55%, 60%, 65%, 70%, 75%, 80%, 85%, 90%, 91%, 92%, 93%, 94%, 95%, 96%, 97%, 98%, or 99% identical to the amino acid sequences described herein, while maintaining the domain architecture shown in FIG. 34.

[0289] In one aspect, the present disclosure provides nucleic acid sequences that are at least 10%, 15%, 20%, 25%, 30%, 35%, 40%, 45%, 50%, 55%, 60%, 65%, 70%, 75%, 80%, 85%, 90%, 91%, 92%, 93%, 94%, 95%, 96%, 97%, 98%, or 99% identical to the nucleic sequences described herein (e.g., in any of SEQ ID NOS: 601-682), while maintaining the domain architecture shown in FIG. 41. In another aspect, the present disclosure also provides amino acid sequences that are at least 10%, 15%, 20%, 25%, 30%, 35%, 40%, 45%, 50%, 55%, 60%, 65%, 70%, 75%, 80%, 85%, 90%, 91%, 92%, 93%, 94%, 95%, 96%, 97%, 98%, or 99% identical to the amino acid sequences described herein, while maintaining the domain architecture shown in FIG. 41. In some embodiments, the nucleic acid sequences have at least a portion (e.g., at least 1, 2, 3, 4, 5, 6, 7, 8, 9, 10, 11, 12, 13, 14, 15, 20, 30, 40, 50, 60, 70, 80, 90, or 100 nucleotides, e.g., contiguous or non-contiguous nucleotides) that are the same as the sequences described herein. In some embodiments, the nucleic acid sequences have at least a portion (e.g., at least 1, 2, 3, 4, 5, 6, 7, 8, 9, 10, 11, 12, 13, 14, 15, 20, 30, 40, 50, 60, 70, 80, 90, or 100 nucleotides, e.g., contiguous or non-contiguous nucleotides) that is different from the sequences described herein.

[0290] In some embodiments, the amino acid sequences have at least a portion (e.g., at least 1, 2, 3, 4, 5, 6, 7, 8, 9, 10, 11, 12, 13, 14, 15, 20, 30, 40, 50, 60, 70, 80, 90, or 100 amino acid residues, e.g., contiguous or non-contiguous amino acid residues) that is the same as the sequences described herein. In some embodiments, the amino acid sequences have at least a portion (e.g., at least 1, 2, 3, 4, 5, 6, 7, 8, 9, 10, 11, 12, 13, 14, 15, 20, 30, 40, 50, 60, 70, 80, 90, or 100 amino acid residues, e.g., contiguous or non-contiguous amino acid residues) that is different from the sequences described herein.

[0291] To determine the percent identity of two amino acid sequences, or of two nucleic acid sequences, the sequences are aligned for optimal comparison purposes (e.g., gaps can be introduced in one or both of a first and a second amino acid or nucleic acid sequence for optimal alignment and non-homologous sequences can be disregarded for comparison purposes). In general, the length of a reference sequence aligned for comparison purposes should be at least 80% of the length of the reference sequence, and in some embodiments at least 90%, 95%, or 100% of the length of the reference sequence. The amino acid residues or nucleotides at corresponding amino acid positions or nucleotide positions are then compared. When a position in the first sequence is occupied by the same amino acid residue or nucleotide as the corresponding position in the second sequence, then the molecules are identical at that position. The percent identity between the two sequences is a function of the number of identical positions shared by the sequences, taking into account the number of gaps, and the length of each gap, which need to be introduced for optimal alignment of the two sequences. For purposes of the present disclosure, the comparison of sequences and determination of percent identity between two sequences can be accomplished using a Blossum 62 scoring matrix with a gap penalty of 12, a gap extend penalty of 4, and a frameshift gap penalty of 5.

### RNA Guide and RNA Guide Modifications

[0292] In some embodiments, an RNA guide described herein comprises a uracil (U). In some embodiments, an RNA guide described herein comprises a thymine (T). In some embodiments, a direct repeat sequence of an RNA guide described herein comprises a uracil (U). In some embodiments, a direct repeat sequence of an RNA guide described herein comprises a thymine (T). In some embodiments, a direct repeat sequence according to Table 4, 7, 11, 14, 18, 24, 32, 35, or 30 comprises a sequence comprising a uracil, in one or more (e.g., all) places indicated as thymine in the corresponding sequences in Table 4, 7, 11, 14, 18, 24, 32, 35, or 30.

[0293] In some embodiments, the direct repeat comprises only one copy of a sequence that is repeated in an endogenous CRISPR array. In some embodiments, the direct repeat is a full-length sequence adjacent to (e.g., flanking) one or more spacer sequences found in an endogenous CRISPR array. In some embodiments, the direct repeat is a portion (e.g., processed portion) of a full-length sequence adjacent to (e.g., flanking) one or more spacer sequences found in an endogenous CRISPR array.

[0294] Spacer and Direct Repeat

[0295] CLUST.133120

[0296] The spacer length of RNA guides can range from about 15 to 55 nucleotides. In some embodiments, the spacer length of an RNA guide is at least 15 nucleotides, at least 16 nucleotides, at least 17 nucleotides, at least 18 nucleotides, at least 19 nucleotides, at least 20 nucleotides, at least 21 nucleotides, or at least 22 nucleotides. In some embodiments, the spacer length is from 15 to 17 nucleotides, from 15 to 23 nucleotides, from 16 to 22 nucleotides, from 17 to 20 nucleotides, from 20 to 24 nucleotides (e.g., 20, 21, 22, 23, or 24 nucleotides), from 23 to 25 nucleotides (e.g., 23, 24, or 25 nucleotides), from 24 to 27 nucleotides, from 27 to 30 nucleotides, from 30 to 45 nucleotides (e.g., 30, 31, 32, 33, 34, 35, 40, or 45 nucleotides), from 30 or 35 to 40 nucleotides, from 41 to 45 nucleotides, from 45 to 50 nucleotides, or longer.

[0297] In some embodiments, the direct repeat length of the RNA guide is at least 16 nucleotides, or is from 16 to 20 nucleotides (e.g., 16, 17, 18, 19, or 20 nucleotides). In some embodiments, the direct repeat length of the RNA guide is 19 nucleotides.

[0298] Exemplary full-length direct repeat sequences (e.g., direct repeat sequences of pre-crRNAs or unprocessed crRNAs) and direct repeat sequences of mature crRNAs (e.g., direct repeat sequences of processed crRNAs) are shown in Table 32. See also TABLE 4.

TABLE 32
Exemplary direct repeat sequences of pre-crRNA and mature crRNA sequences.

| Effector | pre-crRNA Direct Repeat Sequence | Mature crRNA Direct Repeat Sequence |
|---|---|---|
| 3300027740 (SEQ | CCAACCAATGCCAGCGCGACGG | AATGCCAGCGCGACGGCTTATG |
| ID NO:1) | CTTATGAGTCGCGAC (SEQ ID | AGTCGCGAC (SEQ ID NO: 85) |
| | NO: 51) | |
| 3300017971 | GGTAAAACACCTGCGAGATGGT | AACACCTGCGAGATGGTTTATGA |
| (SEQ ID NO: 2) | TTATGAATCTCGAC (SEQ ID NO: | ATCTCGAC (SEQ ID NO: 86) |
| | 52) | |
| SRR2657585 | CCAACAATGCTAGCGAGACGGC | AATGCTAGCGAGACGGCTTCAT |
| (SEQ ID NO: 16) | TTCATGATCTCGACG (SEQ ID | GATCTCGACG (SEQ ID NO: 87) |
| | NO: 59) | |

[0299] In some embodiments, PAMs corresponding to effectors of the present application are set forth as 5′-TTN-3′ and 5′-TN-3′. As used herein, N's can each be any nucleotide (e.g., A, G, T, or C) or a subset thereof (e.g., R (A or G), Y (C or T), K (G or T), B (G, T, or C), H (A, C, or T).

[0300] In some embodiments, an RNA guide further comprises a tracrRNA. In some embodiments, the tracrRNA is not required (e.g., the tracrRNA is optional). In some embodiments, the tracrRNA is a portion of the non-coding sequences shown in TABLE 5. For example, in some embodiments, the optional tracrRNA is a sequence of TABLE 33.

TABLE 33
Exemplary tracrRNA sequences.

| Effector | tracrRNA |
|---|---|
| 3300027740 | GAACACCAGCGAGATGGTTTATGAATCTCGACAGGTCGAAGTAGATACC |
| (SEQ ID NO: 1) | AAA (SEQ ID NO: 88) |
| | ATGAAGAGGTAACACCTACGAGACGGTTTATGAGTTTCGACTATACTAC |
| | TGATAATCTGCCCCAACT (SEQ ID NO: 89) |
| | ATGGTTTATAAATCTCGACAGACTCGCGGATGGAAGAGAACTCGCGACA |
| | CTCGCGGGGTAGAACACCAGCGAGATGGTTTAT (SEQ ID NO: 90) |
| | GGTTTATAAATCTCGACAGACTCGCGGATGGAAGAGAACTCGCGACACT |
| | CGCGGGGTAGAACACCAGCGAGATGGTT (SEQ ID NO: 91) |
| 3300017971 | AATGCGCAAGATGGCTGCCGAGGTGCTAGGCGAGGAGCTGGAAACGCC |
| (SEQ ID NO: 2) | GACTGGGCGT (SEQ ID NO: 92) |
| | TATGCCAACCCCATTTTTCCAGCCAGGCGATCCGCGTTGCCACCGCGCC |
| | GGCAGACCCAAGGGGACAGCGCTCAAGAAAATGCGCAAGATGGCTGCC |
| | GAGGTGCTAGGCGAGGAGCTGGAAACGCCGACTGGGCGTATGA (SEQ ID |
| | NO: 93) |
| | CTACTATTTATGTAGTAATCATTATGCCAACCCCATTTTTCCAGCCAGGC |
| | GATCCGCGT (SEQ ID NO: 94) |

[0301] CLUST.099129

[0302] The spacer length of RNA guides can range from about 15 to 55 nucleotides. In some embodiments, the spacer length of an RNA guide is at least 15 nucleotides, at least 16 nucleotides, at least 17 nucleotides, at least 18 nucleotides, at least 19 nucleotides, at least 20 nucleotides, at least 21 nucleotides, or at least 22 nucleotides. In some embodiments, the spacer length is from 15 to 17 nucleotides, from 15 to 23 nucleotides, from 16 to 22 nucleotides, from 17 to 20 nucleotides, from 20 to 24 nucleotides (e.g., 20, 21, 22, 23, or 24 nucleotides), from 23 to 25 nucleotides (e.g., 23, 24, or 25 nucleotides), from 24 to 27 nucleotides, from 27 to 30 nucleotides, from 30 to 45 nucleotides (e.g., 30, 31, 32, 33, 34, 35, 40, or 45 nucleotides), from 30 or 35 to 40 nucleotides, from 41 to 45 nucleotides, from 45 to 50 nucleotides, from 50 to 55 nucleotides, or longer.

[0303] In some embodiments, the direct repeat length of the RNA guide is at least 16 nucleotides, or is from 16 to 20 nucleotides (e.g., 16, 17, 18, 19, or 20 nucleotides). In some embodiments, the direct repeat length of the RNA guide is up to 40 nucleotides. See TABLE 11.

[0304] Exemplary full-length direct repeat sequences (e.g., direct repeat sequences of pre-crRNAs or unprocessed crRNAs) and direct repeat sequences of mature crRNAs (e.g., direct repeat sequences of processed crRNAs) are shown in Table 7. See also TABLE 11.

TABLE 7
Exemplary direct repeat sequences of pre-crRNA and mature crRNA sequences.

| Effector | pre-crRNA Direct Repeat Sequence | Mature crRNA Direct Repeat Sequence |
|---|---|---|
| SRR6837557 | AGTCGCGAATAACTGTTCAGCGG | ATAACTGTTCAGCGGAGAAGCC |
| (SEQ ID NO: 101) | AGAAGCCGCTGAAAC | GCTG (SEQ ID NO: 181) |
| | (SEQ ID NO: 146) | |
| 3300012971 | GTGATTGCAGACTGGTCGTGCGA | TGGTCGTGCGAATGCGCACGGC |
| (SEQ ID NO: 102) | ATGCGCACGGCAC (SEQ ID NO: | AC (SEQ ID NO: 182) |
| | 147) | |
| SRR6266511 | GTGCCGTGCGGATTCGCACGACC | TGGTCGTGCGAATCCGCACGGC |
| (SEQ ID NO: 123) | AACTTTCAATTAC | AC (SEQ ID NO: 183) |
| | (SEQ ID NO: 180) | |
| SRR6837571 | GTCGCGAATAACTGTTCAGCGGA | ATAACTGTTCAGCGGAGAAGCC |
| (SEQ ID NO: 145) | GAAGCCGCTGAAAC (SEQ ID NO: | GCTG (SEQ ID NO: 181) |
| | 162) | |

[0305] In some embodiments, PAMs corresponding to effectors of the present application are set forth as 5′-GTN-3′, 5′-TG-3′, 5′-TR-3′, or 5′-RATG-3′. As used herein, N's can each be any nucleotide (e.g., A, G, T, or C) or a subset thereof (e.g., R (A or G), Y (C or T), K (G or T), B (G, T, or C), H (A, C, or T).

[0306] In some embodiments, an RNA guide further comprises a tracrRNA. In some embodiments, the tracrRNA is not required (e.g., the tracrRNA is optional). In some embodiments, the tracrRNA is a portion of the non-coding sequences shown in TABLE 12. For example, in some embodiments, the optional tracrRNA is a sequence of TABLE 8.

TABLE 8
Exemplary tracrRNA sequences.

| Effector | tracrRNA Sequence |
|---|---|
| SRR6837557 | TTGGGTTTGTGAAAACGGAAGGGCTGTAA |
| (SEQ ID | TCTCGCCTTGATATTGGCTTAATTTCAGG |
| NO: 101) | TTGAAAGTAAGAACGGGAC (SEQ ID NO: 184) |
| | TGTCTTGATCCCGTCGGTGGAGAAACGTAGT |
| | GTGACACTCAACCAGCAGA |
| | (SEQ ID NO: 185) |
| 3300012971 | TCTACACCTATGACTGTTGGCCGCAAG |
| (SEQ ID | AAAAGCCGCTCAAGGCGCTA |
| NO: 102) | TGGGACACGGCGCATGA (SEQ ID NO: 186) |
| | GGTCTACACCTATGACTGTTGGCCGCA AGAAAAGCCGCTCAAGGCGC |
| | TATGGGACACGGCGCATG |
| | (SEQ ID NO: 187) |
| SRR6266511 | ACTTGCGAGTGATGCACGCAAGTGAAG |
| (SEQ ID | TGCGGCTTGAGATTGTTGAAAAGCATT |
| NO: 123) | GACACTCCCACCGCTGGAAGCGGCGGG |
| | ATTCTTGCTTCAACG (SEQ ID NO: 188) |
| | CTACAGATGCATGCTGCGGGAGAAACC |
| | GCCCCAAGCGCTGTGGGACA |
| | CAGCGCGTGAGATGGACGTGACCACAA |
| | GCCTAT (SEQ ID NO: 189) |
| SRR6837571 | TAGTTCACCCGTTGTTGGATGTGCTTA |
| (SEQ ID | ACTTTTACAACTTTGGTG (SEQ |
| NO: 145) | ID NO: 190) |
| | GTTTGTGAAAACGGAAGGGCTGTAATC |
| | TCGCCTTGATATTGGCTTAAT |
| | TTCAGGTTGAAAGTAAG (SEQ ID NO: 191) |

[0307] CLUST.342201

[0308] The spacer length of RNA guides can range from about 12 to 62 nucleotides. In some embodiments, the spacer length of RNA guides can range from about 19 to 40 nucleotides. In some embodiments, the spacer length of an RNA guide is at least 12 nucleotides, at least 13 nucleotides, at least 14 nucleotides, at least 15 nucleotides, at least 16 nucleotides, at least 17 nucleotides, at least 18 nucleotides, at least 19 nucleotides, at least 20 nucleotides, at least 21 nucleotides, or at least 22 nucleotides. In some embodiments, the spacer length is from 15 to 17 nucleotides, from 15 to 23 nucleotides, from 16 to 22 nucleotides, from 17 to 20 nucleotides, from 20 to 24 nucleotides (e.g., 20, 21, 22, 23, or 24 nucleotides), from 23 to 25 nucleotides (e.g., 23, 24, or 25 nucleotides), from 24 to 27 nucleotides, from 27 to 30 nucleotides, from 30 to 45 nucleotides (e.g., 30, 31, 32, 33, 34, 35, 40, or 45 nucleotides), from 30 or 35 to 40 nucleotides, from 41 to 45 nucleotides, from 45 to 50 nucleotides, from 50 to 62 nucleotides, or longer.

[0309] In some embodiments, the direct repeat length of the RNA guide is at least 16 nucleotides, or is from 16 to 20 nucleotides (e.g., 16, 17, 18, 19, or 20 nucleotides). In some embodiments, the direct repeat length of the RNA guide is 19 nucleotides. In some embodiments, the direct repeat length of the RNA guide is greater than 20 nucleotides. See TABLE 18.

[0310] Exemplary full-length direct repeat sequences (e.g., direct repeat sequences of pre-crRNAs or unprocessed crRNAs) are shown in Table 14. See also TABLE 18.

TABLE 14
Exemplary direct repeat sequences of
pre-crRNA sequences.

| | pre-crRNA Direct |
|---|---|
| Effector | Repeat Sequence |
| 3300006417 | GTTCACCCCACGGGTGCGT |
| (SEQ ID NO: 301) | GGAGTGATGG (SEQ ID |
| | NO: 342) |
| 3300014060 | CCCTCACTCCACACCCGCG |
| (SEQ ID NO: 306) | CGGGGTAACC (SEQ ID |
| | NO: 384) |
| 3300020180 | CAGCGCACGAGGAGGTGCTG |
| (SEQ ID NO: 307) | (SEQ ID NO: 346) |
| 3300013127 | CCAATCGCCCACGTACGCGT |
| (SEQ ID NO: 316) | GGGCCCGAC (SEQ ID |
| | NO: 390) |
| 3300007960 | CCCTCACCCCACACGCACGT |
| (SEQ ID NO: 317) | GGGGCGTAT (SEQ ID |
| | NO: 391) |
| 3300025687 | CCCTCACCCCACACGCACGT |
| (SEQ ID NO: 319) | GGGGCGTAT (SEQ ID |
| | NO: 391) |
| 3300017963 | CGTGTGAATGCGTGAAATTG |
| (SEQ ID NO: 320) | AGTAGAGGATATGTCAG |
| | (SEQ ID NO: 352) |
| 3300017971 | GTGTGAATGCGTGAAATTGA |
| (SEQ ID NO: 323) | GTAGAGGATATGTCAG |
| | (SEQ ID NO: 353) |
| OVSM01005865 | TATGTAATTATGTATGTAGT |
| (SEQ ID NO: | TTTATGTGTAATATT |
| 332) | (SEQ ID NO: 397) |
| 3300009089 | ACCTCGTGCTCACTCAACTC |
| (SEQ ID NO: 337) | GATGATCTGCTCAA (SEQ |
| | ID NO: 400) |
| 3300006417 | GTTCACCCCACAGGCGCGTG |
| (SEQ ID NO: 340) | GAGTGATGG (SEQ ID |
| | NO: 362) |

[0311] In some embodiments, PAMs corresponding to effectors of the present application are set forth as 5′-AAG-3′, 5′-AAD-3′, 5′-AAR-3′, 5′-RAAG-3′ (SEQ ID NO: 921), 5′-RAAR-3′ (SEQ ID NO: 922), 5′-RAAD-3′ (SEQ ID NO: 923). As used herein, R corresponds to A or G, and D corresponds to A or G or T.

[0312] In some embodiments, an RNA guide further comprises a tracrRNA. In some embodiments, the tracrRNA is a portion of the non-coding sequences shown in TABLE 19. For example, in some embodiments, the optional tracrRNA is a sequence of TABLE 15.

TABLE 15
Exemplary tracrRNA sequences.

| Effector | tracrRNA Sequence |
|---|---|
| 3300006417 | ACTACATGGCGAAACCACGAACCAAACAAGAGTACGGCCCGTTTAGCG |
| (SEQ ID NO: | TGCGTCTGCCTGTTG (SEQ ID NO: 403) |
| 301) | AAGAGATGCGGTCGCTTCACTCGATGGTGCTTGTTCTACTACGCTCCGCT |
| | TTAGAAGCGCGTCTTCAAGCAGAATCAACATCATCGAGTGTTGGGAA |
| | (SEQ ID NO: 404) |
| | GAACAAGAGATGCGGTCGCTTCACTCGATGGTGCTTGTTCTACTACGCT |
| | CCGCTTTAGAAGCGCGTCTTCAAGCAGAATCAACATCATCGAGTGTTGG |
| | GAACGGCG (SEQ ID NO: 405) |
| | AGTGGTTTGACTGTTGCGTTCATGGTGTATTTATTTTACCT (SEQ ID NO: |
| | 453) |
| | GTTCGTGGTTTCGCCATGTAGTTATTCTACCACCAAAACAGGTACACGG |
| | TCAAC (SEQ ID NO: 406) |
| 3300014060 | GGTGATATGGCAAAGAAAGAGAGACTCAAGACCATCAACATCTTGTTG |
| (SEQ ID NO: | CGCTTGCCGCCCGAGCTTCACGCCGCGCTGAAAAGGTGGGCGCAAGAG |
| 306) | GA (SEQ ID NO: 407) |
| | TGATATGGCAAAGAAAGAGAGACTCAAGACCATCAACATCTTGTTGCGC |
| | TTGCCGCCCGAGCTTCACGCCGCGCTGAAAAGGTGGGCGCAAGAGGA |
| | (SEQ ID NO: 408) |
| | TGGTGATATGGCAAAGAAAGAGAGACTCAAGACCATCAACATCTTGTTG |
| | C (SEQ ID NO: 409) |
| | GGCAAAGAAAGAGAGACTCAAGACCATCAACATCTTGTTGCGCTTGCCG |
| | CCCGAGCTTCACGCCGCGCTGAAAAGGTGGGCGCAAGAGGAACGTCGC |
| | CCGCTAAACTGGCAGATCGTGCGCGTTCT (SEQ ID NO: 410) |
| | GGTGATATGGCAAAGAAAGAGAGACTCAAGACCATCAACATCTTGTTG |
| | CGCTTGCCGCCCGAGCTTCACGCCGCGCTGAAAAGGTGGGCGCAAGAG |
| | GAACGTCGCCCGCTAAACTGGCAGATCGTGCGCGT (SEQ ID NO: 411) |
| 3300020180 | CTGCGAAGAACATTGTCGCGGCCGGGCAGGTCGAGACGAAAAACGGAC |
| (SEQ ID NO: | GTGGAGGGCATGTGAGACGGATGGTGCCTTTGGGCACCTGCGCAGTGCT |
| 307) | CGATGAAGCGT (SEQ ID NO: 412) |
| | TGCGAAGAACATTGTCGCGGCCGGGCAGGTCGAGACGAAAAACGGACG |
| | TGGAGGGCATGTGAGACGGATGGTGCCTTTGGGCACCTGCGCAGTGCTC |
| | GATG (SEQ ID NO: 413) |
| | CGCACGAGGAGGTGCTGTGGAGCCCAGGAAGAGAGGCACCAGCGCACG |
| | AGGAGGTGCTGTGGAGCCCAGGAAGAGAGGCACCAGCGCACGAGGAG |
| | GTGCTGGTAGCCATCGGGTAGGTC (SEQ ID NO: 414) |
| | AGCGCACGAGGAGGTGCTGTGGAGCCCAGGAAGAGAGGCACCAGCGCA |
| | CGAGGAGGTGCTGTGGAGCCCAGGAAGAGAGGCACCAGCGCACGAGGA |
| | GGTGCTGGTAGCCATCGGGTAGGTCGAAAATAT (SEQ ID NO: 415) |
| | TCGAGACGAAAAACGGACGTGGAGGGCATGTGAGACGGATGGTGCCTT |
| | TGGGCACCTGCGCAGTGCTCGATGAAGCGTCAA (SEQ ID NO: 416) |
| 3300013127 | CCTCAACATCCGGCGCGGGCGGCTACAGACTGCGGGTTGTCAGATTGTT |
| (SEQ ID NO: | AAATGCCGCCCGCA (SEQ ID NO: 417) |
| 316) | CCTCAACATCCGGCGCGGGCGGCTACAGACTGCGGGTTGTCAGATTGTT |
| | AAATGCCGCCCGCACC (SEQ ID NO: 418) |
| | TGAACATTGCGTCGAATCTCGCTACCGTCAAATCGGCGGAAAGTCAAGC |
| | CTGTGGATAGGCCGGC (SEQ ID NO: 419) |
| | CCCGCAGTCTGTAGCCGCCCGCGCCGGATGTTGAGGAGTAAACAATGGA |
| | CACTCT (SEQ ID NO: 420) |
| 3300007960 | TGACCTCAGTACGAAGTGCACGGCAGGCGCACCGAGTACCGGACGGCT |
| (SEQ ID NO: | TGAGACATG (SEQ ID NO: 421) |
| 317) | TGCGCCTGCCGTGCACTTCGTACTGAGGTCAAGTATACTGCAAAATTCT |
| | GCACTTGTCAAGCATTAATTTGCGTGAGTTTCTTGACAGTCTGCACAAGT |
| | TTGCAGTATAATGGACTCATGAACAGAGCACACC (SEQ ID NO: 422) |
| | TTTAGCTACTTAAAAACAGAGTTCAATCGTTTGCGCAGTGAAGACGGGT |
| | TTGCCCCGT (SEQ ID NO: 423) |
| | CGGGTTTGCCCCGTTTGTATCAGAGGTTCAAAGCTACGCATATCAGCAG |
| | GCGTCAAAGACTTGTAACGCTTGCGGGGAAAAGGTAGATGCATTGCC |
| | (SEQ ID NO: 424) |
| | CATTTCACCAACAATCCCGCTGGCAGGCGGAGAGAGGCAGGCAGAACA |
| | TGAACACACGCCC (SEQ ID NO: 425) |
| 3300025687 | TAGCTACTTAAAAACAGAGTTCAATCGTTTGCGCAGTGAAGACGGGTTT |
| (SEQ ID NO: | GCCCCGTTTGTATCAGAG (SEQ ID NO: 426) |
| 319) | GGTGTCTCGGTTTACGTGGAACTGGGCATTAGCAGCGTATAACGATGGC |
| | GTTCCGTTTAGCTACTTAAAAACAGAGTTCAATCGTTTGCGCAGTGAAG |
| | ACGGGTTTGCCCCGT (SEQ ID NO: 427) |
| | GTCTCGGTTTACGTGGAACTGGGCATTAGCAGCGTATAACGATGGCGTT |
| | CCGTTTAGCTACTTAAAAACAGAGTTCAATCGTTTGCGCAGTGAAGACG |
| | GGTTTGCCCCGTTTGT (SEQ ID NO: 428) |
| | CTACTTAAAAACAGAGTTCAATCGTTTGCGCAGTGAAGACGGGTTTGCC |
| | CCGTTTGTATC (SEQ ID NO: 429) |
| | GACGCATTTGTTGGTTCGCCGGAATGGGACGAACACGACATTCGGGAAC |
| | GCATGGAGGAAGAAGCAGAGT (SEQ ID NO: 430) |
| 3300017971 | AACAGTATTGAATGTCGCCGTCGGGCAGACGGAGACTCTAAACGCTCGC |
| (SEQ ID NO: | TGAGCGGACGGCCGCTGTCGTGGAAGGATGTGC (SEQ ID NO: 431) |
| 323) | AGTATTGAATGTCGCCGTCGGGCAGACGGAGACTCTAAACGCTCGCTGA |
| | GCGGACGGCCGCTGTCGTGGAAGGATGTGCTCTTTCGCGTTCATGCTGA |
| | CTGCGTTGAAGCGAGAATCCCTCTACG (SEQ ID NO: 432) |
| | TCTTTAACAGTATTGAATGTCGCCGTCGGGCAGACGGAGACTCTAAACG |
| | CTCGCTGAGCGGACGGCCGCTGTCGTGGAAGGATGTGCTCTTTCGCGTT |
| | CATGCTGACTGCGTTGAAGCGAGAATCCCTCTACG (SEQ ID NO: 433) |
| | TCTTTAACAGTATTGAATGTCGCCGTCGGGCAGACGGAGACTCTAAACG |
| | CTCGCTGAGCGGACGGCCGCTGTCGTGGAAGGATGTGCTCTTTCGCGTT |
| | CATGCTGACTGCGTTGAAGCGAGAATCCCTCTACGATTCG (SEQ ID NO: |
| | 434) |
| OVSM0100586 | GAATCTGTTAGTAGATTTTCATTATTAGAAGCACACTTAACTCCCTTGTT |
| 5 (SEQ ID NO: | GGTGTGCTTCTCTCTTTTCTAC (SEQ ID NO: 435) |
| 332) | CAGTCTTTAGTTTCTCGTTTGAGGGAGTTGGATAATACGTATTGGGATTG |
| | TTTTTTAAAGAGAAAAGAAGGAGCCCAACTTCCTTGTGGCGTTA (SEQ ID |
| | NO: 436) |
| | TTAGTTTCTCGTTTGAGGGAGTTGGATAATACGTATTGGGATTGTTTTTT |
| | AAAGAGAAAAGAAGGAGCCCAACTTCCTTGTGGCGTTAT (SEQ ID NO: |
| | 437) |
| | CAATGATCATTGCAAAAGGGATGCGAAAATAGGTTTTTAAGTGATAATC |
| | CACAAAACATATCAGTTTAGATTAAAGCCAACAAAAGAACAGGAGGCT |
| | TTGTTTTGGCGGTTTTC (SEQ ID NO: 438) |
| 3300009089 | GAGCAGGAGCTACTGCGAGGAGCAGACTGTGACGAAGCGAGCATACAA |
| (SEQ ID NO: | GTTCAGGTGTTATCCGACAGATGAGCAAAAGCAGATTCTTG (SEQ ID NO: |
| 337) | 439) |
| | GAGCAGGAGCTACTGCGAGGAGCAGACTGTGACGAAGCGAGCATACAA |
| | GTTCAGGTGTT (SEQ ID NO: 440) |
| | GAAAGAGAGAATCCTCGGACGAGCCGCGCAGCTTTTCAACCAGCAGGG |
| | ATACTTCGGCTCGTCACTCTCCGATAT (SEQ ID NO: 441) |
| | CATGTAGGCATGTCCTAGATGTCTAAGTATTGGAGAACGGATTTTTATG |
| | AGCAAAGGTGAGCAAACG (SEQ ID NO: 442) |
| | ACGAAGCGAGCATACAAGTTCAGGTGTTATCCGACAGATGAGCAAAAG |
| | CAGATTCTTGCTCGCACGTTCGGCTGCTGTCGCTGGGTCTACAA (SEQ ID |
| | NO: 443) |
| | ACGAAGCGAGCATACAAGTTCAGGTGTTATCCGACAGATGAGCAAAAG |
| | CAGATTCTTGCTCGCACGTTCGGCTGCTGTCGCTGGGTCT (SEQ ID |
| | NO: 444) |
| 3300006417 | GCGGTAGTAATCACGTCGAGACGCAAAACGCCTGGGGACGGTGTAGGT |
| (SEQ ID NO: | AGCAAACCGGATGAACCAGGAGTTCACGCAATTGAATAGGT (SEQ ID |
| 340) | NO: 445) |
| | GTCGCGGTAGTAATCACGTCGAGACGCAAAACGCCTGGGGACGGTGTA |
| | GGTAGCAAACCGGATGAACCAGGAGTTCACGCAATTGAATAG (SEQ ID |
| | NO: 446) |
| | GAGGCCGTGAAGATGGCAGGCGCTGCCTAGTGCGCCCGTCGCGGTAGT |
| | AATCACGTCGAGACGCAAAACGCCTGGGGACGGTGTAGGTAGCAAACC |
| | GGATGAACCAGGAGTTCACGCAATTGAATAGGTG (SEQ ID NO: 447) |
| | CGCAGCGGTCAACATCCGCAACGAGGCCGTGAAGATGGCAGGCGCTGC |
| | CTAGTGCGCCCGTCGCGGTAGTAATCACGTCGAGACGCAAAACGCCTGG |
| | GGACGGTGTAGGTAGCAAACCGGATGAACCAGGAGTTCACGCAA (SEQ |
| | ID NO: 448) |
| | CTATCGGTGCGCTGGTGGCAGTGCCCGACCTGCGGCGCAGAACATGATC |
| | GGGACGGCAACGCA (SEQ ID NO: 449) |
| | GCTGGCTGAGTTGAACGCCGCCTATGACCGGGGTGAACGGCCTGCGATT |
| | GGAACCTGCAATGAGTGCG (SEQ ID NO: 450) |

[0313] CLUST.1950099

[0314] The spacer length of RNA guides can range from about 15 to 55 nucleotides. The spacer length of RNA guides can range from about 20 to 39 nucleotides. In some embodiments, the spacer length of an RNA guide is at least 15 nucleotides, at least 16 nucleotides, at least 17 nucleotides, at least 18 nucleotides, at least 19 nucleotides, at least 20 nucleotides, at least 21 nucleotides, or at least 22 nucleotides. In some embodiments, the spacer length is from 15 to 17 nucleotides, from 15 to 23 nucleotides, from 16 to 22 nucleotides, from 17 to 20 nucleotides, from 20 to 24 nucleotides (e.g., 20, 21, 22, 23, or 24 nucleotides), from 23 to 25 nucleotides (e.g., 23, 24, or 25 nucleotides), from 24 to 27 nucleotides, from 27 to 30 nucleotides, from 30 to 45 nucleotides (e.g., 30, 31, 32, 33, 34, 35, 40, or 45 nucleotides), from 30 or 35 to 40 nucleotides, from 41 to 45 nucleotides, from 45 to 50 nucleotides, from 50 to 55 nucleotides, or longer.

[0315] In some embodiments, the direct repeat length of the RNA guide is at least 16 nucleotides, or is from 16 to 20 nucleotides (e.g., 16, 17, 18, 19, or 20 nucleotides). In some embodiments, the direct repeat length of the RNA guide is about 39 nucleotides. See TABLE 24.

[0316] Exemplary full-length direct repeat sequences (e.g., direct repeat sequences of pre-crRNAs or unprocessed crRNAs) is shown in Table 20. See also TABLE 24.

TABLE 20
Exemplary direct repeat sequences
of pre-crRNA sequences.

| Effector | pre-crRNA Direct Repeat Sequence |
|---|---|
| SRR6201554 | CCAGCAACAGCCGCGTGGGGCT |
| (SEQ ID NO: 501) | ACTAGTACTGCGAC |
| | (SEQ ID NO: 522) |
| 3300028603 (SEQ | CCAACAACAGCCGCGCGGGGCT |
| ID NO: 517) | GCGAATACTGCGAC |
| | (SEQ ID NO: 529) |

[0317] In some embodiments, the mature crRNA (e.g., direct repeat sequences of processed crRNAs) corresponding to the effector of SEQ ID NO: 501 is CAACAGCCGCGTGGGGCTACTAGTACTGCG (SEQ ID NO: 535).

[0318] In some embodiments, PAMs corresponding to effectors of the present application are set forth as 5′-TTN-3′. As used herein, N's can each be any nucleotide (e.g., A, G, T, or C) or a subset thereof (e.g., R (A or G), Y (C or T), K (G or T), B (G, T, or C), H (A, C, or T).

[0319] In some embodiments, an RNA guide further comprises a tracrRNA. In some embodiments, the tracrRNA is not required (e.g., the tracrRNA is optional). In some embodiments, the tracrRNA is a portion of the non-coding sequences shown in TABLE 25. For example, in some embodiments, the optional tracrRNA is a sequence of TABLE 21.

TABLE 21
Exemplary tracrRNA sequences.

| Effector | tracrRNA Sequence |
|---|---|
| SRR6201554 | GAATTGGTGACGGTGTGTCCGGCT |
| (SEQ ID NO: 501) | TGCGGCACCGCCAGGGACAAGGA |
| | CGTTGGCGCGGCCGAGGTGA |
| | (SEQ ID NO: 536) |
| | GACACCGCACCAACAGCCGCGTGG |
| | GGCTTCCAATACCTCGACAGTCG |
| | CCCCACCGCTCGACGTGCGAACCC |
| | CA (SEQ ID NO: 537) |
| | CACCGCCAGGGACAAGGACGTTGG |
| | CGCGGCCGAGGTGATCCTTCGGC |
| | GCGCAGAGGAGGCGCTCGCAAAGC |
| | ATTCTGCAGAGTAGCGAAATCAA |
| | (SEQ ID NO: 538) |

[0320] CLUST.057059

[0321] The spacer length of RNA guides can range from about 15 to 50 nucleotides. In some embodiments, the spacer length of RNA guides can range from about 20 to 44 nucleotides. In some embodiments, the spacer length of an RNA guide is at least at least 15 nucleotides, at least 16 nucleotides, at least 17 nucleotides, at least 18 nucleotides, at least 19 nucleotides, at least 20 nucleotides, at least 21 nucleotides, or at least 22 nucleotides. In some embodiments, the spacer length is from 15 to 17 nucleotides, from 15 to 23 nucleotides, from 16 to 22 nucleotides, from 17 to 20 nucleotides, from 20 to 24 nucleotides (e.g., 20, 21, 22, 23, or 24 nucleotides), from 23 to 25 nucleotides (e.g., 23, 24, or 25 nucleotides), from 24 to 27 nucleotides, from 27 to 30 nucleotides, from 30 to 45 nucleotides (e.g., 30, 31, 32, 33, 34, 35, 40, or 45 nucleotides), from 30 or 35 to 40 nucleotides, from 41 to 45 nucleotides, from 45 to 50 nucleotides, or longer.

[0322] In some embodiments, the direct repeat length of the RNA guide is at least 16 nucleotides, or is from 16 to 20 nucleotides (e.g., 16, 17, 18, 19, or 20 nucleotides). In some embodiments, the direct repeat length of the RNA guide is 19 nucleotides. In some embodiments, the direct repeat length of the RNA guide is greater than 20 nucleotides. See TABLE 30.

[0323] Exemplary full-length direct repeat sequences (e.g., direct repeat sequences of pre-crRNAs or unprocessed crRNAs) are shown in Table 26. See also TABLE 30.

TABLE 26
Exemplary direct repeat sequences
of pre-crRNA sequences.

| | |
|---|---|
| Effector | pre-crRNA Direct Repeat Sequence |
| 3300023179 (SEQ | CTTGCAACTGGGCTTGGGGACTG |
| ID NO: 601) | AGGATAGTTGAAAC (SEQ ID NO: 683) |
| 3300002382 (SEQ | CTTGCAACTAAGACTGGGGACTG |
| ID NO: 615) | AGGATAGTTGAAACT (SEQ ID NO: 693) |

[0324] In some embodiments, PAMs corresponding to effectors of the present application are set forth as 5′-GTN-3′. As used herein, N's can each be any nucleotide (e.g., A, G, T, or C) or a subset thereof (e.g., R (A or G), Y (C or T), K (G or T), B (G, T, or C), H (A, C, or T).

[0325] In some embodiments, an RNA guide further comprises a tracrRNA. In some embodiments, the tracrRNA is not required (e.g., the tracrRNA is optional). In some embodiments, the tracrRNA is a portion of the non-coding sequences shown in TABLE 31. For example, in some embodiments, the optional tracrRNA is a sequence of TABLE 27.

TABLE 27
Exemplary tracrRNA sequences.

| Effector | tracrRNA Sequence |
|---|---|
| 3300023179 (SEQ | GACAGTAAACAAAAAATAAGATGGAC |
| ID NO: 601) | TATATTTATAAACCAGGAAACATAGT |
| | TATTACAATTGCATTGTAGGTTTCAA |
| | CCTGATACCCACTAAAGCGTGTTAGT |
| | GGGTATTTTTTATTTA |
| | (SEQ ID NO: 739) |
| | AAACAAAAAATAAGATGGACTATATT |
| | TATAAACCAGGAAACATAGTTATTAC |
| | AATTGCATTGTAGGTTTCAACCTGAT |
| | ACCCACTAAAGCGTGTTAGTGGGTAT |
| | TTTTTATTTATG |
| | (SEQ ID NO: 740) |
| | AATATTAAATTACCGCAGTTTGGGC |
| | GGGTTGCTAATAATATTAGCTTA |
| | TGACTTCTAAGGCTTTTGCCTAAAA |
| | AGTAAGGGGGAAGGCGACAACC |
| | CCCAAAGACCAGCCGGAACTATGGC |
| | TGGCAACTATCTCATCTTTTTGG |
| | CATATCAAAGCTAGGGCAAAAACCC |
| | CAGACATTCGCCAAAAGCCCAG |
| | AACCATGACATTGCAAGAGTTTCGC |
| | CCAGTTTCTTTTAAAGACCCAAG |
| | CTGATTTAAGCGGCTGAAATGAGAT |
| | TTTTTA (SEQ ID NO: 741) |
| | ATATTAAATTACCGCAGTTTGGGC |
| | GGGTTGCTAATAATATTAGCTTAT |
| | GACTTCTAAGGCTTTTGCCTAA |
| | (SEQ ID NO: 742) |
| | TTATCCAAACTAGCGACTAAGTAC |
| | CTGGTAATAAAAACGTGATTACT |
| | TTGA (SEQ ID NO: 743) |
| | CCAAACTAGCGACTAAGTACCTG |
| | GTAATAAAAACGTGATTACTTTGA |
| | A (SEQ ID NO: 744) |
| 3300002382 (SEQ | AAATTACCGCAGTTTGGGCGGGCA |
| ID NO: 615) | GCTAATAATATTAGCTTATGACTT |
| | CTAAGGCTTTTGCCTAAAAAGT |
| | (SEQ ID NO: 745) |
| | TTAAATTACCGCAGTTTGGGCGGG |
| | CAGCTAATAATATTAGCTTATGAC |
| | TTCTAAGGCTTTTGCCTAAAAA |
| | (SEQ ID NO: 746) |
| | CTGAAATGAGATTTTTTAATGTGT |
| | AATCGTCTAGCCTGGGAACATATA |
| | TGCAACTTGCAATTAACTCAGTTC |
| | CTCAAGTCCGGTTTCACCTA (SEQ |
| | ID NO: 747) |
| | ATGAGATTTTTTAATGTGTAATCG |
| | TCTAGCCTGGGAACATATATGCAA |
| | CTTGCAATTAACTCAGTTCCTCAA |
| | GTCCGGTTTCACCTATTA (SEQ ID |
| | NO: 748) |
| | CCCAGACATTCGCCAAAAGCCCAG |
| | AACCATGACATTGCAAGAGTTTC |
| | GCCCAGTTTCTTTTAAAGATTCAA |
| | GCTGATTTAAGCGGCTGAAATGAG |
| | ATTTTTTAATGTGTAATCGT |
| | (SEQ ID NO: 749) |
| | CCCCAGACATTCGCCAAAAGCCCA |
| | GAACCATGACATTGCAAGAGTTT |
| | CGCCCAGTTTCTTTTAAAGATTCAA |
| | GCTGATTTAAGCGGCTGAAATGA |
| | GATTTTTTAATGT (SEQ ID NO: 750) |

[0326] The RNA guide sequences can be modified in a manner that allows for formation of the CRISPR complex and successful binding to the target, while at the same time not allowing for successful nuclease activity (i.e., without nuclease activity/without causing indels). These modified guide sequences are referred to as “dead guides” or “dead guide sequences.” These dead guides or dead guide sequences may be catalytically inactive or conformationally inactive with regard to nuclease activity. Dead guide sequences are typically shorter than respective guide sequences that result in active cleavage. In some embodiments, dead guides are 5%, 10%, 20%, 30%, 40%, or 50% shorter than respective RNA guides that have nuclease activity. Dead guide sequences of RNA guides can be from 13 to 15 nucleotides in length (e.g., 13, 14, or 15 nucleotides in length), from 15 to 19 nucleotides in length, or from 17 to 18 nucleotides in length (e.g., 17 nucleotides in length).

[0327] Thus, in one aspect, the disclosure provides non-naturally occurring or engineered CRISPR systems including functional CLUST.133120, CLUST.099129, CLUST.342201, CLUST.195009, and CLUST.057059 CRISPR effectors as described herein, and an RNA guide wherein the RNA guide comprises a dead guide sequence, whereby the RNA guide is capable of hybridizing to a target sequence such that the CRISPR system is directed to a genomic locus of interest in a cell without detectable cleavage activity. A detailed description of dead guides is described, e.g., in WO 2016094872, which is incorporated herein by reference in its entirety.

[0328] Inducible RNA Guides

[0329] RNA guides can be generated as components of inducible systems. The inducible nature of the systems allows for spatiotemporal control of gene editing or gene expression. In some embodiments, the stimuli for the inducible systems include, e.g., electromagnetic radiation, sound energy, chemical energy, and/or thermal energy.

[0330] In some embodiments, the transcription of RNA guide can be modulated by inducible promoters, e.g., tetracycline or doxycycline controlled transcriptional activation (Tet-On and Tet-Off expression systems), hormone inducible gene expression systems (e.g., ecdysone inducible gene expression systems), and arabinose-inducible gene expression systems. Other examples of inducible systems include, e.g., small molecule two-hybrid transcription activations systems (FKBP, ABA, etc.), light inducible systems (Phytochrome, LOV domains, or cryptochrome), or Light Inducible Transcriptional Effector (LITE). These inducible systems are described, e.g., in WO 2016205764 and U.S. Pat. No. 8,795,965, each of which is incorporated herein by reference in its entirety.

[0331] Chemical Modifications

[0332] Chemical modifications can be applied to the phosphate backbone, sugar, and/or base of the RNA guide. Backbone modifications such as phosphorothioates modify the charge on the phosphate backbone and aid in the delivery and nuclease resistance of the oligonucleotide (see, e.g., Eckstein, “Phosphorothioates, essential components of therapeutic oligonucleotides,” Nucl. Acid Ther., 24 (2014), pp. 374-387); modifications of sugars, such as 2′-O-methyl (2′-OMe), 2′-F, and locked nucleic acid (LNA), enhance both base pairing and nuclease resistance (see, e.g., Allerson et al. “Fully 2′-modified oligonucleotide duplexes with improved in vitro potency and stability compared to unmodified small interfering RNA,” J. Med. Chem., 48.4 (2005): 901-904). Chemically modified bases such as 2-thiouridine or N6-methyladenosine, among others, can allow for either stronger or weaker base pairing (see, e.g., Bramsen et al., “Development of therapeutic-grade small interfering RNAs by chemical engineering,” Front. Genet., 2012 Aug. 20; 3:154). Additionally, RNA is amenable to both 5′ and 3′ end conjugations with a variety of functional moieties including fluorescent dyes, polyethylene glycol, or proteins.

[0333] A wide variety of modifications can be applied to chemically synthesized RNA guide molecules. For example, modifying an oligonucleotide with a 2′-OMe to improve nuclease resistance can change the binding energy of Watson-Crick base pairing. Furthermore, a 2′-OMe modification can affect how the oligonucleotide interacts with transfection reagents, proteins or any other molecules in the cell. The effects of these modifications can be determined by empirical testing.

[0334] In some embodiments, the RNA guide includes one or more phosphorothioate modifications. In some embodiments, the RNA guide includes one or more locked nucleic acids for the purpose of enhancing base pairing and/or increasing nuclease resistance.

[0335] A summary of these chemical modifications can be found, e.g., in Kelley et al., “Versatility of chemically synthesized guide RNAs for CRISPR-Cas9 genome editing,” J. Biotechnol. 2016 Sep. 10; 233:74-83; WO 2016205764; and U.S. Pat. No. 8,795,965, each which is incorporated by reference in its entirety.

[0336] Sequence Modifications

[0337] The sequences and the lengths of the RNA guides, tracrRNAs, and crRNAs described herein can be optimized. In some embodiments, the optimized length of RNA guide can be determined by identifying the processed form of tracrRNA and/or crRNA, or by empirical length studies for RNA guides, tracrRNAs, crRNAs, and the tracrRNA tetraloops.

[0338] The RNA guides can also include one or more aptamer sequences. Aptamers are oligonucleotide or peptide molecules that can bind to a specific target molecule. The aptamers can be specific to gene effectors, gene activators, or gene repressors. In some embodiments, the aptamers can be specific to a protein, which in turn is specific to and recruits/binds to specific gene effectors, gene activators, or gene repressors. The effectors, activators, or repressors can be present in the form of fusion proteins. In some embodiments, the RNA guide has two or more aptamer sequences that are specific to the same adaptor proteins. In some embodiments, the two or more aptamer sequences are specific to different adaptor proteins. The adaptor proteins can include, e.g., MS2, PP7, Qβ, F2, GA, fr, JP501, M12, R17, BZ13, JP34, JP500, KU1, M11, MX1, TW18, VK, SP, FI, ID2, NL95, TW19, AP205, ϕCb5, ϕCb8r, ϕCb12r, ϕCb23r, 7 s, and PRR1. Accordingly, in some embodiments, the aptamer is selected from binding proteins specifically binding any one of the adaptor proteins as described herein. In some embodiments, the aptamer sequence is a MS2 loop. A detailed description of aptamers can be found, e.g., in Nowak et al., “Guide RNA engineering for versatile Cas9 functionality,” Nucl. Acid. Res., 2016 Nov. 16;44(20):9555-9564; and WO 2016205764, each of which is incorporated herein by reference in its entirety.

[0339] Guide: Target Sequence Matching Requirements

[0340] In CRISPR systems, the degree of complementarity between a guide sequence and its corresponding target sequence can be about 50%, 60%, 75%, 80%, 85%, 90%, 95%, 97.5%, 99%, or 100%. To reduce off-target interactions, e.g., to reduce the guide interacting with a target sequence having low complementarity, mutations can be introduced to the CRISPR systems so that the CRISPR systems can distinguish between target and off-target sequences that have greater than 80%, 85%, 90%, or 95% complementarity. In some embodiments, the degree of complementarity is from 80% to 95%, e.g., about 83%, 84%, 85%, 86%, 87%, 88%, 89%, 90%, 91%, 92%, 93%, 94%, or 95% (for example, distinguishing between a target having 18 nucleotides from an off-target of 18 nucleotides having 1, 2, or 3 mismatches). Accordingly, in some embodiments, the degree of complementarity between a guide sequence and its corresponding target sequence is greater than 94.5%, 95%, 95.5%, 96%, 96.5%, 97%, 97.5%, 98%, 98.5%, 99%, 99.5%, or 99.9%. In some embodiments, the degree of complementarity is 100%.

[0341] It is known in the field that complete complementarity is not required provided that there is sufficient complementarity to be functional. Modulations of cleavage efficiency can be exploited by introduction of mismatches, e.g., one or more mismatches, such as 1 or 2 mismatches between spacer sequence and target sequence, including the position of the mismatch along the spacer/target. The more central (i.e., not at the 3′ or 5′ ends) a mismatch, e.g., a double mismatch, is located; the more cleavage efficiency is affected. Accordingly, by choosing mismatch positions along the spacer sequence, cleavage efficiency can be modulated. For example, if less than 100% cleavage of targets is desired (e.g., in a cell population), 1 or 2 mismatches between spacer and target sequence can be introduced in the spacer sequences.

### Methods of Using CRISPR Systems

[0342] The CRISPR systems described herein have a wide variety of utilities including modifying (e.g., deleting, inserting, translocating, inactivating, or activating) a target polynucleotide in a multiplicity of cell types. The CRISPR systems have a broad spectrum of applications in, e.g., DNA/RNA detection (e.g., specific high sensitivity enzymatic reporter unlocking (SHERLOCK)), tracking and labeling of nucleic acids, enrichment assays (extracting desired sequence from background), detecting circulating tumor DNA, preparing next generation library, drug screening, disease diagnosis and prognosis, and treating various genetic disorders.

[0343] DNA/RNA Detection

[0344] In one aspect, the CRISPR systems described herein can be used in DNA/RNA detection. Single effector RNA-guided DNases can be reprogrammed with CRISPR RNAs (crRNAs) to provide a platform for specific single-stranded DNA (ssDNA) sensing. Upon recognition of its DNA target, activated Type V single effector DNA-guided DNases engage in “collateral” cleavage of nearby non-targeted ssDNAs. This crRNA-programmed collateral cleavage activity allows the CRISPR systems to detect the presence of a specific DNA by nonspecific degradation of labeled ssDNA.

[0345] The collateral ssDNA activity can be combined with a reporter in DNA detection applications such as a method called the DNA Endonuclease-Targeted CRISPR trans reporter (DETECTR) method, which achieves attomolar sensitivity for DNA detection (see, e.g., Chen et al., Science, 360(6387):436-439, 2018), which is incorporated herein by reference in its entirety. One application of using the enzymes described herein is to degrade non-specific ssDNA in an in vitro environment. A “reporter” ssDNA molecule linking a fluorophore and a quencher can also be added to the in vitro system, along with an unknown sample of DNA (either single-stranded or double-stranded). Upon recognizing the target sequence in the unknown piece of DNA, the effector complex cleaves the reporter ssDNA resulting in a fluorescent readout.

[0346] In other embodiments, the SHERLOCK method (Specific High Sensitivity Enzymatic Reporter UnLOCKing) also provides an in vitro nucleic acid detection platform with attomolar (or single-molecule) sensitivity based on nucleic acid amplification and collateral cleavage of a reporter ssDNA, allowing for real-time detection of the target. Methods of using CRISPR in SHERLOCK are described in detail, e.g., in Gootenberg, et al. “Nucleic acid detection with CRISPR-Cas13a/C2c2,” Science, 356(6336):438-442 (2017), which is incorporated herein by reference in its entirety.

[0347] In some embodiments, the CRISPR systems described herein can be used in multiplexed error-robust fluorescence in situ hybridization (MERFISH). These methods are described in, e.g., Chen et al., “Spatially resolved, highly multiplexed RNA profiling in single cells,” Science, 2015 Apr. 24; 348(6233):aaa6090, which is incorporated herein by reference in its entirety.

[0348] Tracking and Labeling of Nucleic Acids

[0349] Cellular processes depend on a network of molecular interactions among proteins, RNAs, and DNAs. Accurate detection of protein-DNA and protein-RNA interactions is key to understanding such processes. In vitro proximity labeling techniques employ an affinity tag combined with, a reporter group, e.g., a photoactivatable group, to label polypeptides and RNAs in the vicinity of a protein or RNA of interest in vitro. After UV irradiation, the photoactivatable groups react with proteins and other molecules that are in close proximity to the tagged molecules, thereby labelling them. Labelled interacting molecules can subsequently be recovered and identified. The RNA targeting effector proteins can for instance be used to target probes to selected RNA sequences. These applications can also be applied in animal models for in vivo imaging of diseases or difficult-to culture cell types. The methods of tracking and labeling of nucleic acids are described, e.g., in U.S. Pat. No. 8,795,965; WO 2016205764; and WO 2017070605, each of which is incorporated herein by reference in its entirety.

[0350] High-Throughput Screening

[0351] The CRISPR systems described herein can be used for preparing next generation sequencing (NGS) libraries. For example, to create a cost-effective NGS library, the CRISPR systems can be used to disrupt the coding sequence of a target gene, and the CRISPR effector transfected clones can be screened simultaneously by next-generation sequencing (e.g., on the Ion Torrent PGM system). A detailed description regarding how to prepare NGS libraries can be found, e.g., in Bell et al., “A high-throughput screening strategy for detecting CRISPR-Cas9 induced mutations using next-generation sequencing,” BMC Genomics, 15.1 (2014): 1002, which is incorporated herein by reference in its entirety.

[0352] Engineered Cells

[0353] Microorganisms (e.g., E. coli, yeast, and microalgae) are widely used for synthetic biology. The development of synthetic biology has a wide utility, including various clinical applications. For example, the programmable CRISPR systems can be used to split proteins of toxic domains for targeted cell death, e.g., using cancer-linked RNA as target transcript. Further, pathways involving protein-protein interactions can be influenced in synthetic biological systems with e.g., fusion complexes with the appropriate effectors such as kinases or enzymes.

[0354] In some embodiments, RNA guide sequences that target phage sequences can be introduced into the microorganism. Thus, the disclosure also provides methods of “vaccinating” a microorganism (e.g., a production strain) against phage infection.

[0355] In some embodiments, the CRISPR systems provided herein can be used to engineer microorganisms, e.g., to improve yield or improve fermentation efficiency. For example, the CRISPR systems described herein can be used to engineer microorganisms, such as yeast, to generate biofuel or biopolymers from fermentable sugars, or to degrade plant-derived lignocellulose derived from agricultural waste as a source of fermentable sugars. More particularly, the methods described herein can be used to modify the expression of endogenous genes required for biofuel production and/or to modify endogenous genes, which may interfere with the biofuel synthesis. These methods of engineering microorganisms are described e.g., in Verwaal et al., “CRISPR/Cpf1 enables fast and simple genome editing of Saccharomyces cerevisiae,” Yeast, 2017 Sep. 8. doi: 10.1002/yea.3278; and Hlavova et al., “Improving microalgae for biotechnology—from genetics to synthetic biology,” Biotechnol. Adv., 2015 Nov. 1; 33:1194-203, each of which is incorporated herein by reference in its entirety.

[0356] In some embodiments, the CRISPR systems provided herein can be used to engineer eukaryotic cells or eukaryotic organisms. For example, the CRISPR systems described herein can be used to engineer eukaryotic cells not limited to a plant cell, a fungal cell, a mammalian cell, a reptile cell, an insect cell, an avian cell, a fish cell, a parasite cell, an arthropod cell, an invertebrate cell, a vertebrate cell, a rodent cell, a mouse cell, a rat cell, a primate cell, a non-human primate cell, or a human cell. In some embodiments, eukaryotic cell is in an in vitro culture. In some embodiments, the eukaryotic cell is in vivo. In some embodiments, the eukaryotic cell is ex vivo.

[0357] Gene Drives

[0358] Gene drive is the phenomenon in which the inheritance of a particular gene or set of genes is favorably biased. The CRISPR systems described herein can be used to build gene drives. For example, the CRISPR systems can be designed to target and disrupt a particular allele of a gene, causing the cell to copy the second allele to fix the sequence. Because of the copying, the first allele will be converted to the second allele, increasing the chance of the second allele being transmitted to the offspring. A detailed method regarding how to use the CRISPR systems described herein to build gene drives is described, e.g., in Hammond et al., “A CRISPR-Cas9 gene drive system targeting female reproduction in the malaria mosquito vector Anopheles gambiae,” Nat. Biotechnol., 2016 January; 34(1):78-83, which is incorporated herein by reference in its entirety.

[0359] Pooled-Screening

[0360] As described herein, pooled CRISPR screening is a powerful tool for identifying genes involved in biological mechanisms such as cell proliferation, drug resistance, and viral infection. Cells are transduced in bulk with a library of RNA guide-encoding vectors described herein, and the distribution of gRNAs is measured before and after applying a selective challenge. Pooled CRISPR screens work well for mechanisms that affect cell survival and proliferation, and they can be extended to measure the activity of individual genes (e.g., by using engineered reporter cell lines). Arrayed CRISPR screens, in which only one gene is targeted at a time, make it possible to use RNA-seq as the readout. In some embodiments, the CRISPR systems as described herein can be used in single-cell CRISPR screens. A detailed description regarding pooled CRISPR screenings can be found, e.g., in Datlinger et al., “Pooled CRISPR screening with single-cell transcriptome read-out,” Nat. Methods., 2017 March; 14(3):297-301, which is incorporated herein by reference in its entirety.

[0361] Saturation Mutagenesis (“Bashing”)

[0362] The CRISPR systems described herein can be used for in situ saturating mutagenesis. In some embodiments, a pooled RNA guide library can be used to perform in situ saturating mutagenesis for particular genes or regulatory elements. Such methods can reveal critical minimal features and discrete vulnerabilities of these genes or regulatory elements (e.g., enhancers). These methods are described, e.g., in Canver et al., “BCL11A enhancer dissection by Cas9-mediated in situ saturating mutagenesis,” Nature, 2015 Nov. 12; 527(7577):192-7, which is incorporated herein by reference in its entirety.

[0363] Therapeutic Applications

[0364] In some embodiments, the CRISPR systems described herein can be used to edit a target nucleic acid to modify the target nucleic acid (e.g., by inserting, deleting, or mutating one or more amino acid residues). For example, in some embodiments the CRISPR systems described herein comprise an exogenous donor template nucleic acid (e.g., a DNA molecule or an RNA molecule), which comprises a desirable nucleic acid sequence. Upon resolution of a cleavage event induced with the CRISPR system described herein, the molecular machinery of the cell can utilize the exogenous donor template nucleic acid in repairing and/or resolving the cleavage event. Alternatively, the molecular machinery of the cell can utilize an endogenous template in repairing and/or resolving the cleavage event. In some embodiments, the CRISPR systems described herein may be used to modify a target nucleic acid resulting in an insertion, a deletion, and/or a point mutation). In some embodiments, the insertion is a scarless insertion (i.e., the insertion of an intended nucleic acid sequence into a target nucleic acid resulting in no additional unintended nucleic acid sequence upon resolution of the cleavage event). Donor template nucleic acids may be double-stranded or single-stranded nucleic acid molecules (e.g., DNA or RNA). Methods of designing exogenous donor template nucleic acids are described, for example, in WO 2016094874, the entire contents of which is expressly incorporated herein by reference.

[0365] In another aspect, the disclosure provides the use of a system described herein in a method selected from the group consisting of RNA sequence specific interference; RNA sequence-specific gene regulation; screening of RNA, RNA products, lncRNA, non-coding RNA, nuclear RNA, or mRNA; mutagenesis; inhibition of RNA splicing; fluorescence in situ hybridization; breeding; induction of cell dormancy; induction of cell cycle arrest; reduction of cell growth and/or cell proliferation; induction of cell anergy; induction of cell apoptosis; induction of cell necrosis; induction of cell death; or induction of programmed cell death.

[0366] The CRISPR systems described herein can have various therapeutic applications. In some embodiments, the new CRISPR systems can be used to treat various diseases and disorders, e.g., genetic disorders (e.g., monogenetic diseases) or diseases that can be treated by nuclease activity (e.g., Pcsk9 targeting or BCL1 la targeting). In some embodiments, the methods described here are used to treat a subject, e.g., a mammal, such as a human patient. The mammalian subject can also be a domesticated mammal, such as a dog, cat, horse, monkey, rabbit, rat, mouse, cow, goat, or sheep.

[0367] The methods can include the condition or disease being infectious, and wherein the infectious agent is selected from the group consisting of human immunodeficiency virus (HIV), herpes simplex virus-1 (HSV1), and herpes simplex virus-2 (HSV2).

[0368] In one aspect, the CRISPR systems described herein can be used for treating a disease caused by overexpression of RNAs, toxic RNAs and/or mutated RNAs (e.g., splicing defects or truncations). For example, expression of the toxic RNAs may be associated with the formation of nuclear inclusions and late-onset degenerative changes in brain, heart, or skeletal muscle. In some embodiments, the disorder is myotonic dystrophy. In myotonic dystrophy, the main pathogenic effect of the toxic RNAs is to sequester binding proteins and compromise the regulation of alternative splicing (see, e.g., Osborne et al., “RNA-dominant diseases,” Hum. Mol. Genet., 2009 Apr. 15; 18(8):1471-81). Myotonic dystrophy (dystrophia myotonica (DM)) is of particular interest to geneticists because it produces an extremely wide range of clinical features. The classical form of DM, which is now called DM type 1 (DM1), is caused by an expansion of CTG repeats in the 3′-untranslated region (UTR) of DMPK, a gene encoding a cytosolic protein kinase. The CRISPR systems as described herein can target overexpressed RNA or toxic RNA, e.g., the DMPK gene or any of the mis-regulated alternative splicing in DM1 skeletal muscle, heart, or brain.

[0369] The CRISPR systems described herein can also target trans-acting mutations affecting RNA-dependent functions that cause various diseases such as, e.g., Prader Willi syndrome, Spinal muscular atrophy (SMA), and Dyskeratosis congenita. A list of diseases that can be treated using the CRISPR systems described herein is summarized in Cooper et al., “RNA and disease,” Cell, 136.4 (2009): 777-793, and WO 2016205764, each of which is incorporated herein by reference in its entirety.

[0370] The CRISPR systems described herein can also be used in the treatment of various tauopathies, including, e.g., primary and secondary tauopathies, such as primary age-related tauopathy (PART)/Neurofibrillary tangle (NFT)-predominant senile dementia (with NFTs similar to those seen in Alzheimer Disease (AD), but without plaques), dementia pugilistica (chronic traumatic encephalopathy), and progressive supranuclear palsy. A useful list of tauopathies and methods of treating these diseases are described, e.g., in WO 2016205764, which is incorporated herein by reference in its entirety.

[0371] The CRISPR systems described herein can also be used to target mutations disrupting the cis-acting splicing codes that can cause splicing defects and diseases. These diseases include, e.g., motor neuron degenerative disease that results from deletion of the SMN1 gene (e.g., spinal muscular atrophy), Duchenne Muscular Dystrophy (DMD), frontotemporal dementia, and Parkinsonism linked to chromosome 17 (FTDP-17), and cystic fibrosis.

[0372] The CRISPR systems described herein can further be used for antiviral activity, in particular, against RNA viruses. The effector proteins can target the viral RNAs using suitable RNA guides selected to target viral RNA sequences.

[0373] Furthermore, in vitro RNA sensing assays can be used to detect specific RNA substrates. The RNA targeting effector proteins can be used for RNA-based sensing in living cells. Examples of applications are diagnostics by sensing of, for examples, disease-specific RNAs.

[0374] A detailed description of therapeutic applications of the CRISPR systems described herein can be found, e.g., in U.S. Pat. No. 8,795,965, EP 3009511, WO 2016205764, and WO 2017070605, each of which is incorporated herein by reference in its entirety.

[0375] Applications in Plants

[0376] The CRISPR systems described herein have a wide variety of utility in plants. In some embodiments, the CRISPR systems can be used to engineer genomes of plants (e.g., improving production, making products with desired post-translational modifications, or introducing genes for producing industrial products). In some embodiments, the CRISPR systems can be used to introduce a desired trait to a plant (e.g., with or without heritable modifications to the genome) or regulate expression of endogenous genes in plant cells or whole plants.

[0377] In some embodiments, the CRISPR systems can be used to identify, edit, and/or silence genes encoding specific proteins, e.g., allergenic proteins (e.g., allergenic proteins in peanuts, soybeans, lentils, peas, green beans, and mung beans). A detailed description regarding how to identify, edit, and/or silence genes encoding proteins is described, e.g., in Nicolaou et al., “Molecular diagnosis of peanut and legume allergy,” Curr. Opin. Allergy Clin. Immunol., 11(3):222-8 (2011) and WO 2016205764, each of which is incorporated herein by reference in its entirety.

[0378] Delivery of CRISPR Systems

[0379] Through this disclosure and knowledge in the art, the CRISPR systems described herein, components thereof, nucleic acid molecules thereof, or nucleic acid molecules encoding or providing components thereof can be delivered by various delivery systems such as vectors, e.g., plasmids or viral delivery vectors. The CRISPR effectors and/or any of the RNAs (e.g., RNA guides) disclosed herein can be delivered using suitable vectors, e.g., plasmids or viral vectors, such as adeno-associated viruses (AAV), lentiviruses, adenoviruses, and other viral vectors, or combinations thereof. An effector and one or more RNA guides can be packaged into one or more vectors, e.g., plasmids or viral vectors.

[0380] In some embodiments, vectors, e.g., plasmids or viral vectors, are delivered to the tissue of interest by, e.g., intramuscular injection, intravenous administration, transdermal administration, intranasal administration, oral administration, or mucosal administration. Such delivery may be either via one dose or multiple doses. One skilled in the art understands that the actual dosage to be delivered herein may vary greatly depending upon a variety of factors, including, but not limited to, the vector choices, the target cells, organisms, tissues, the general conditions of the subject to be treated, the degrees of transformation/modification sought, the administration routes, the administration modes, and the types of transformation/modification sought.

[0381] In certain embodiments, delivery is via adenoviruses, which can be one dose containing at least 1×10⁵ particles (also referred to as particle units, pu) of adenoviruses. In some embodiments, the dose preferably is at least about 1×10⁶ particles, at least about 1×10⁷ particles, at least about 1×10⁸ particles, and at least about 1×10⁹ particles of the adenoviruses. The delivery methods and the doses are described, e.g., in WO 2016205764 and U.S. Pat. No. 8,454,972, each of which is incorporated herein by reference in its entirety.

[0382] In some embodiments, delivery is via plasmids. The dosage can be a sufficient number of plasmids to elicit a response. In some cases, suitable quantities of plasmid DNA in plasmid compositions can be from about 0.1 to about 2 mg. Plasmids will generally include (i) a promoter; (ii) a sequence encoding a nucleic acid-targeting CRISPR effector, operably linked to the promoter; (iii) a selectable marker; (iv) an origin of replication; and (v) a transcription terminator downstream of and operably linked to (ii). The plasmids can also encode the RNA components of a CRISPR complex, but one or more of these may instead be encoded on different vectors. The frequency of administration is within the ambit of the medical or veterinary practitioner (e.g., physician, veterinarian), or a person skilled in the art.

[0383] In another embodiment, delivery is via liposomes or lipofectin formulations or the like and can be prepared by methods known to those skilled in the art. Such methods are described, for example, in WO 2016205764, U.S. Pat. Nos. 5,593,972, 5,589,466, and 5,580,859, each of which is incorporated herein by reference in its entirety.

[0384] In some embodiments, delivery is via nanoparticles or exosomes. For example, exosomes have been shown to be particularly useful in delivery RNA.

[0385] Further means of introducing one or more components of the CRISPR systems described herein to a cell is by using cell-penetrating peptides (CPP). In some embodiments, a cell penetrating peptide is linked to a CRISPR effector. In some embodiments, a CRISPR effector and/or RNA guide is coupled to one or more CPPs for transportation into a cell (e.g., plant protoplasts). In some embodiments, the CRISPR effector and/or RNA guide(s) are encoded by one or more circular or non-circular DNA molecules that are coupled to one or more CPPs for cell delivery.

[0386] CPPs are short peptides of fewer than 35 amino acids derived either from proteins or from chimeric sequences capable of transporting biomolecules across cell membrane in a receptor independent manner. CPPs can be cationic peptides, peptides having hydrophobic sequences, amphipathic peptides, peptides having proline-rich and anti-microbial sequences, and chimeric or bipartite peptides. Examples of CPPs include, e.g., Tat (which is a nuclear transcriptional activator protein required for viral replication by HIV type 1), penetratin, Kaposi fibroblast growth factor (FGF) signal peptide sequence, integrin β3 signal peptide sequence, polyarginine peptide Args sequence, Guanine rich-molecular transporters, and sweet arrow peptide. CPPs and methods of using them are described, e.g., in Hällbrink et al., “Prediction of cell-penetrating peptides,” Methods Mol. Biol., 2015; 1324:39-58; Ramakrishna et al., “Gene disruption by cell-penetrating peptide-mediated delivery of Cas9 protein and guide RNA,” Genome Res., 2014 June;24(6):1020-7; and WO 2016205764, each of which is incorporated herein by reference in its entirety.

[0387] Various delivery methods for the CRISPR systems described herein are also described, e.g., in U.S. Pat. No. 8,795,965, EP 3009511, WO 2016205764, and WO 2017070605, each of which is incorporated herein by reference in its entirety.

### EXAMPLES

[0388] The invention is further described in the following examples, which do not limit the scope of the invention described in the claims.

### Example 1—Identification of Components of CLUST.133120 CRISPR-Cas System

[0389] This protein family was identified using the computational methods described above. The CLUST.133120 system comprises single effectors associated with CRISPR systems found in uncultured metagenomic sequences collected from freshwater, wastewater, soil, and rhizosphere environments (TABLE 2). Exemplary CLUST.133120 effectors include those shown in TABLES 2 and 3, below. Examples of direct repeat sequences for these systems are shown in TABLE 4. Optionally, the system includes a tracrRNA that is contained in a non-coding sequence listed in TABLE 5.

TABLE 2
Representative CLUST.133120 Effector Proteins

| | | # | effector | SEQ |
|---|---|---|---|---|
| source | effector accession | spacers | size (aa) | ID NO |
| terrestrial-soil | 3300027740\|Ga0214474_1000103_17\|M | 3 | 498 | 1 |
| aquatic-non marine saline | 3300017971\|Ga0180438_10084474_2\|M | 4 | 517 | 2 |
| and alkaline-hypersaline | | | | |
| lake sediment | | | | |
| aquatic-freshwater | 3300022592\|Ga0236342_1001376_7\|P | 4 | 756 | 3 |
| aquatic-freshwater- | 3300020171\|Ga0180732_1000630_46\|P | 6 | 487 | 4 |
| groundwater | | | | |
| aquatic-freshwater- | 3300018040\|Ga0187862_10024620_1\|M | 9 | 580 | 5 |
| peatland | | | | |
| aquatic-marine-marine | 3300005253\|Ga0073583_1150562_58\|P | 20 | 511 | 6 |
| sediment | | | | |
| aquatic-marine-marine | 3300005253\|Ga0073583_1150562_51\|M | 20 | 492 | 7 |
| sediment | | | | |
| marine sediment | LAZR01002400_19\|P | 20 | 511 | 8 |
| metagenome | | | | |
| marine sediment | LAZR01002400_15\|M | 20 | 492 | 9 |
| metagenome | | | | |
| marine sediment | SDBU01080949_7\|P | 2 | 511 | 10 |
| metagenome | | | | |
| marine sediment | SDBU01080949_6\|M | 2 | 492 | 11 |
| metagenome | | | | |
| marine sediment | SDBV01087475_1\|P | 17 | 511 | 12 |
| metagenome | | | | |
| marine sediment | SDBV01087475_1\|M | 17 | 492 | 13 |
| metagenome | | | | |
| marine sediment | SRR2657585_2135055_9\|M | 11 | 484 | 14 |
| metagenome | | | | |
| marine sediment | SRR2657585_2135055_8\|P | 11 | 506 | 15 |
| metagenome | | | | |
| marine sediment | SRR2657585_1667169_1\|M | 4 | 532 | 16 |
| metagenome | | | | |
| marine sediment | SRR8451930_3283449_6\|P | 8 | 511 | 17 |
| metagenome | | | | |
| marine sediment | SRR8451930_3283449_6\|M | 8 | 492 | 18 |
| metagenome | | | | |
| marine sediment | SRR8452060_665073_11\|P | 17 | 511 | 19 |
| metagenome | | | | |
| marine sediment | SRR8452060_665073_10\|M | 17 | 492 | 20 |
| metagenome | | | | |
| microbial mat metagenome | SRR6448207_2353026_47\|M | 3 | 605 | 21 |
| peat metagenome | SRR7004342_2720286_9\|P | 19 | 645 | 22 |
| peat metagenome | SRR7004342_2720286_9\|M | 19 | 616 | 23 |
| permafrost metagenome | SRR6491179_278020_2\|M | 5 | 733 | 24 |
| plants-rhizosphere-carex | 3300028800\|Ga0265338_10000470_38\|P | 58 | 651 | 25 |
| aquatilis | | | | |
| plants-rhizosphere-carex | 3300031235\|Ga0265330_10003750_4\|P | 39 | 651 | 26 |
| aquatilis | | | | |
| plants-rhizosphere-carex | 3300031241\|Ga0265325_10000012_120\|M | 58 | 651 | 27 |
| aquatilis | | | | |
| plants-rhizosphere-carex | 3300031242\|Ga0265329_10001065_5\|P | 44 | 651 | 28 |
| aquatilis | | | | |
| plants-rhizosphere-carex | 3300031247\|Ga0265340_10001032_18\|P | 29 | 651 | 29 |
| aquatilis | | | | |
| plants-rhizosphere-carex | 3300031250\|Ga0265331_10001842_6\|P | 44 | 651 | 30 |
| aquatilis | | | | |
| plants-rhizosphere-carex | 3300031344\|Ga0265316_10000001_557\|P | 53 | 651 | 31 |
| aquatilis | | | | |
| plants-rhizosphere-spartina | 3300031733\|Ga0316577_10033675_3\|M | 7 | 505 | 32 |
| alterniflora | | | | |
| rhizosphere metagenome | SRR8543844_2229942_334\|P | 58 | 651 | 33 |
| rhizosphere metagenome | SRR8543847_1991039_375\|P | 58 | 651 | 34 |
| rhizosphere metagenome | SRR8543989_2137428_34\|M | 58 | 651 | 35 |
| rhizosphere metagenome | SRR8543995_2079833_6\|M | 51 | 651 | 36 |
| rhizosphere metagenome | SRR8544146_618080_5\|P | 24 | 651 | 37 |
| sediment metagenome | SRR6963591_1323413_2\|M | 3 | 517 | 38 |
| soil metagenome | SRR7976138_3273187_71\|P | 20 | 571 | 39 |
| soil metagenome | SRR7976138_3273187_70\|M | 20 | 582 | 40 |
| terrestrial-soil | 3300012943\|Ga0164241_10000441_40\|P | 20 | 571 | 41 |
| terrestrial-soil | 3300012943\|Ga0164241_10000441_39\|M | 20 | 582 | 42 |
| terrestrial-soil | 3300031949\|Ga0214473_10000008_352\|M | 53 | 691 | 43 |
| terrestrial-soil | 3300031965\|Ga0326597_10001868_12\|M | 9 | 404 | 44 |
| terrestrial-soil-arctic peat | 3300006795\|Ga0075520_1037237_1\|M | 4 | 559 | 45 |
| soil | | | | |
| terrestrial-soil-bog | 3300014491\|Ga0182014_10039677_1\|P | 5 | 733 | 46 |
| terrestrial-soil-bog | 3300014491\|Ga0182014_10071250_1\|M | 2 | 559 | 47 |
| terrestrial-soil-tropical | 3300017975\|Ga0187782_10004712_9\|P | 20 | 645 | 48 |
| peatland | | | | |
| terrestrial-soil-tropical | 3300017975\|Ga0187782_10004712_9\|M | 20 | 616 | 49 |
| peatland | | | | |
| wetland metagenome | SRR7027835_762984_1\|M | 9 | 580 | 50 |

TABLE 3
Amino acid sequences of Representative CLUST.133120 Effector Proteins

>3300027740|Ga0214474_1000103_17|M
[terrestrial-soil]
MTTKVFKYGALPVTLDSEIRKKMKLAREYYNQLVEAENGRRKTVWGGERPKQPPHEHKDEPVCEECKKHWKDIRDKYFATPPLDIK
PLRAKASEAGLYWGTYLIIEESFSAAWKKTDGLSTVRYKSWRDGGIMGVQLQQAHSANGFYRIEQAPDPRKGRKAGQRHAVKIRIG
TRENKPVWSEPIAFEMHRPLQGRPTWVKICYFYRGEREIWSVNITCTDVPERALPDTAKVLAIDIGWRVMSDDSIRAAYARDENGN
ESELLFDSRWRECGDRADRIRSARDDRLNELKKKDTRFSLIKKPSGIRGYVAKNSIEDTEVTEWIKQDRHLEQYELGCRRRSVAVR
KEKLRVWLSSLRKQYATAIIKDSSHKEMKAAKRAKADGMPPPARRNAHHGAPGEIVEEICRAFGRQTNIAIVEAPGTTATCASCGQ
EMEIGAELMITCERCNAREDRDCISTRNMLRLYASGNCKKPTARKTIARFAKRHKNYVEPNQCQRDGL (SEQ ID NO: 1)
>3300017971|Ga0180438_10084474_2|M
[aquatic-non marine saline and alkaline-hypersaline lake sediment]
MKVFKYGARPVNQESLIRDQMKLARNYYNKLVETENKRRQQAWGSEKPPPPPHPPEEVVLPDGSKKTKWCRCEECKTHWKTLREAY
YALDNLDKKPLRAAASSWGLYWGSYLLVEQAFDQAQKTTVYYDPVRFRGWRKGGQAGLQIQNGKNTDSLFKVEEIPDPEPSARSKK
NDRRAGKGKRRGQLRTLRIRIGTEGRTPIWSDPIIFKMHRPLEGTVCWLKICMFYRGDREIWSVNFTCKDTSPRTDSATDGVVAID
VSWRQLPNGDIRLAYARGDNGFEDELTLDNSWLERIKKAERIQSHRDERLNDLKTSDSRFRLFKSPRSARIHIMKNQIAELEDWAK
REKHLEQYELGCKRKTYDVRRDAVRVWLRKLRRLYQTVVIKDSSHKEMKEQAKAKKKLHRAARKQGHHGAPGEIVEEICKVFGRIE
NVAVVIAENTTATCPVCGHMHEVNKERMITCERCGTTDDRDRISTHNLLSRFFDGQYEKPTARKTESKFAKKHKKVEQEVKHLRDG
L (SEQ ID NO: 2)
>3300022592|Ga0236342_1001376_7|P
[aquatic-freshwater]
MIKLLTYDGDCVFVHAGDTTLKTTKAFTHGTIVFDEKARTVTFGKTDAVALPDDLSLKENATLNFQLVAPDGTLRKQVRSGILKAN
EKQPGLLHISGMAKSPRRYAAEDGWGNAIYKYRAYFTHPGLNTDGELPEWLKGSIHRQKAFWNQLAWLCRDARRNCSPVPTEEIIA
FVQQTILPEIDAFNDSLGRSKDKMKHPAKLKKEDPGIDNLWHFVGELRTRIAKGRAVPDGLLEKVITFAQQYKPDYTPLNEFLNHF
TEIAETEAAALKLRRFEIRPTMTAFRASLNRRQTNKSTWSEGWPLIKYPDSPKADDWSLNYYLNKAAVDAAGLESGVNVGGLSFGP
ALEPAATGHANLHGDAAKRKMREAEISILGPDKEPWKFRFGVLQHRPLPENSHIKEWKLLFHNGALWLDIVVELQRPLPATGGLTA
GLEIGWRRTEEGIRFGTLYEPVRSTIRELTIDLQRSPKDQKDRVPFRIDMGPNRWEKRNIARLFLKHKPGEELKFSKASDSIRQIA
ALFPDWKAGDMVPNMLGVRDVLQRRRDAAMQTTKIQMRQHLGEQTPAWLDKAGRRGLLRLQEELKDDAKAQAILNPWWVNDEVIGK
LARFYTARSVRRMEYGQMQVAHDVCRYLRDNGVSRLIVEAKFLAKVAQQQDSNDPVVLQLSQKYRQFSASAKFLAFLKNTAAKYGI
VIDTHVALNISRICHYCDHLNPPTAKESYQCEKCKRVVKQDPNAAINLARFGSDPELAEMAAQAGRVE (SEQ ID NO: 3)
>3300020171|Ga0180732_1000630_46|P
[aquatic-freshwater-groundwater]
MRLGRECYNALVEVENARRHLAWGGDIPPKPPHPLPLTODGDENDDETAWCRCAECKAHWMGIREALHALPPIDTKPIYAHYCTNG
PLYWGTFNHVAQAFSAAWKKTRPWRPVKYRSWRQGGVIAVQIQAGYQKRQNYDTLFRINDVVDTRTRHRHKGHHRATVQLALGAGR
MTSPIEIEQHRPIVGTPTWVTARLCYDSLGRERAAVNFTRRDVPQRTDLAPRGVVAVDVSWRQVPDGLRIAWTRDDQGHNDQLVLD
TRWQFLAKHADQLQAIRDQNLNLLKAVDPAFAQAKSPRHACLILAEIEDPSAVARAWRYREEHLRNYEMGERRHSVNRRRDALRKW
ARELRRNYAEVVVKDSQHKEMKETAKQDKLSRKARRQGQHGAPGEVIAVLREIFGDDGMWLVEAAYTTDRCPLCGHLNAHGAERIV
VCEECGEGLDRDLVSTRNMLVAYAAEERRRPTARKTAARFGKRHKTSTSLDNASPAA (SEQ ID NO: 4)
>3300018040|Ga0187862_10024620_1|M
[aquatic-freshwater-peatland]
MAWLCRETRLKCSPVPTDKIVDFVQNAILPEIDAFNSAPGRSRERMKHPAKLKIETPGLDCLWGFVGELRARTGKGRAVPAGLLDK
VVEFAQQFKTDYTPFNEFIAGFQAIAEREAAALGLRHFEIRPTVGAFKAVLDRRKTTKAHWSEGWPLIKYPDSPKAANWGLHYHLN
KAGVDSALLEREEGIPGLSFGPRLKPADTGHEKLTGVAAKRILREAQISISGDNDERWTFHFGVLQHRPLPPNSHLKEWKLIFQGG
ALWLCLVVELQRPVPVPGPHPAGLDIGWRRTEEGIRFGTLYEPATKTIRELTVDLQKSPCDHKDRVPFRIDLGPSRWEMRNATELV
PDWKPGQPIPSAFETRSVLQIRRDRIKETAKRQLREHLGERLPVWFDKAGRRGLLKLAQDFKNESAVCEILNIWQQKDEQLGKLAS
MYFDRSTKRIEYGHAQVAHDVCRFLQQKGVMRLIVETSFLSKVSQHQDNEDLVSIERSQKYRQFVAVGKFLAALKNTTRKYGIVVE
TVNAMNTTRTCQYCNALNPRTEEEQFTCKRCGRQVQQDHNAAVNLSRFGSDPVLAEMALHADEV (SEQ ID NO: 5)
>3300005253|Ga0073583_1150562_58|P
[aquatic-marine-marine sediment]
MTKVYKYGALPGGDTLCAQMNLGRVYYNSLVEAENERRTTMWGGDRPPSPATHVCKKSCSTCDKAESKKRKPRKHECKKFCPVCRA
HYKALRKQYRSEPPLDVKPFRKKAAEGGLYWGTYLVIEQDFSAAWKETESFSLVKFRSWRQGDMCAVQIQRDKDPDRMFLIKSAPD
PRKKKQQRYTLRLRVGSKGQAPVWAEPLPFEMHRPLQGTATWVKIARKYVADRVIWSVQFTRRDIPERKDNAERGAVAIDVGWRKT
DDGMRIAYARGDDGAEYELVLPPKWMKHADQADRIRSARDQNLVELQKQERFWSVILAVCGFSNKKLFARLKSTLSVRRVAKPGEH
TKWIKKERHLWQYEAGCRNRSVTRRRNDVRVWLRDLRRRYAHAVIKDSCHKKMKENKTSLPKPARRQGHHAAPGEVIEEITRVFGR
ITGVSVVCAVDTTNHCPACSFVNSYGPERVVTCGGCGVVEDRDRVSTQNMMNMYAIGNVRNPTTRKSTPRFAKKHKDPEAP (SEQ
ID NO: 6)
>3300005253|Ga0073583_1150562_51|M
[aquatic-marine-marine sediment]
MNLGRVYYNSLVEAENERRTTMWGGDRPPSPATHVCKKSCSTCDKAESKKRKPRKHECKKFCPVCRAHYKALRKQYRSEPPLDVKP
FRKKAAEGGLYWGTYLVIEQDFSAAWKETESFSLVKFRSWRQGDMCAVQIQRDKDPDRMFLIKSAPDPRKKKQQRYTLRLRVGSKG
QAPVWAEPLPFEMHRPLQGTATWVKIARKYVADRVIWSVQFTRRDIPERKDNAERGAVAIDVGWRKTDDGMRIAYARGDDGAEYEL
VLPPKWMKHADQADRIRSARDQNLVELQKQERFWSVILAVCGFSNKKLFARLKSTLSVRRVAKPGEHTKWIKKERHLWQYEAGCRN
RSVTRRRNDVRVWLRDLRRRYAHAVIKDSCHKKMKENKTSLPKPARRQGHHAAPGEVIEEITRVFGRITGVSVVCAVDTTNHCPAC
SFVNSYGPERVVTCGGCGVVEDRDRVSTQNMMNMYAIGNVRNPTTRKSTPRFAKKHKDPEAP (SEQ ID NO: 7)
>LAZR01002400_19|P
[marine sediment metagenome]
MTKVYKYGALPGGDTLCAQMNLGRVYYNSLVEAENERRTTMWGGDRPPSPATHVCKKSCSTCDKAESKKRKPRKHECKKFCPVCRA
HYKALRKQYRSEPPLDVKPFRKKAAEGGLYWGTYLVIEQDFSAAWKETESFSLVKFRSWRQGDMCAVQIQRDKDPDRMFLIKSAPD
PRKKKQQRYTLRLRVGSKGQAPVWAEPLPFEMHRPLQGTATWVKIARKYVADRVIWSVQFTRRDIPERKDNAERGAVAIDVGWRKT
DDGMRIAYARGDDGAEYELVLPPKWMKHADQADRIRSARDQNLVELQKQERFWSVILAVCGFSNKKLFARLKSTLSVRRVAKPGEH
TKWIKKERHLWQYEAGCRNRSVTRRRNDVRVWLRDLRRRYAHAVIKDSCHKKMKENKTSLPKPARRQGHHAAPGEVIEEITRVFGR
ITGVSVVCAVDTTNHCPACSFVNSYGPERVVTCGGCGVVEDRDRVSTQNMMNMYAIGNVRNPTTRKSTPRFAKKHKDPEAP (SEQ
ID NO: 8)
>LAZR01002400_15|M
[marine sediment metagenome]
MNLGRVYYNSLVEAENERRTTMWGGDRPPSPATHVCKKSCSTCDKAESKKRKPRKHECKKFCPVCRAHYKALRKQYRSEPPLDVKP
FRKKAAEGGLYWGTYLVIEQDFSAAWKETESFSLVKFRSWRQGDMCAVQIQRDKDPDRMFLIKSAPDPRKKKQQRYTLRLRVGSKG
QAPVWAEPLPFEMHRPLQGTATWVKIARKYVADRVIWSVQFTRRDIPERKDNAERGAVAIDVGWRKTDDGMRIAYARGDDGAEYEL
VLPPKWMKHADQADRIRSARDQNLVELQKQERFWSVILAVCGFSNKKLFARLKSTLSVRRVAKPGEHTKWIKKERHLWQYEAGCRN
RSVTRRRNDVRVWLRDLRRRYAHAVIKDSCHKKMKENKTSLPKPARRQGHHAAPGEVIEEITRVFGRITGVSVVCAVDTTNHCPAC
SFVNSYGPERVVTCGGCGVVEDRDRVSTQNMMNMYAIGNVRNPTTRKSTPRFAKKHKDPEAP (SEQ ID NO: 9)
>SDBU01080949_7|P
[marine sediment metagenome]
MTKVYKYGALPGGDTLCAQMNLGRVYYNSLVEAENERRTTMWGGDRPPSPATHVCKKSCSTCDKAESKKRKPRKHECKKFCPVCRA
HYKALRKQYRSEPPLDVKPFRKKAAEGGLYWGTYLVIEQDFSAAWKETESFSLVKFRSWRQGDMCAVQIQRDKDPDRMFLIKSAPD
PRKKKQQRYTLRLRVGSKGQAPVWAEPLPFEMHRPLQGTATWVKIARKYVADRVIWSVQFTRRDIPERKDNAERGAVAIDVGWRKT
DDGMRIAYARGDDGAEYELVLPPKWMKHADQADRIRSARDQNLVELQKQERFWSVILAVCGFSNKKLFARLKSTLSVRRVAKPGEH
TKWIKKERHLWQYEAGCRNRSVTRRRNDVRVWLRDLRRRYAHAVIKDSCHKKMKENKTSLPKPARRQGHHAAPGEVIEEITRVFGR
ITGVSVVCAVDTTNHCPACSFVNSYGPERVVTCGGCGVVEDRDRVSTQNMMNMYAIGNVRNPTTRKSTPRFAKKHKDPEAP (SEQ
ID NO: 10)
>SDBU01080949_6|M
[marine sediment metagenome]
MNLGRVYYNSLVEAENERRTTMWGGDRPPSPATHVCKKSCSTCDKAESKKRKPRKHECKKFCPVCRAHYKALRKQYRSEPPLDVKP
FRKKAAEGGLYWGTYLVIEQDFSAAWKETESFSLVKFRSWRQGDMCAVQIQRDKDPDRMFLIKSAPDPRKKKQQRYTLRLRVGSKG
QAPVWAEPLPFEMHRPLQGTATWVKIARKYVADRVIWSVQFTRRDIPERKDNAERGAVAIDVGWRKTDDGMRIAYARGDDGAEYEL
VLPPKWMKHADQADRIRSARDQNLVELQKQERFWSVILAVCGFSNKKLFARLKSTLSVRRVAKPGEHTKWIKKERHLWQYEAGCRN
RSVTRRRNDVRVWLRDLRRRYAHAVIKDSCHKKMKENKTSLPKPARRQGHHAAPGEVIEEITRVFGRITGVSVVCAVDTTNHCPAC
SFVNSYGPERVVTCGGCGVVEDRDRVSTQNMMNMYAIGNVRNPTTRKSTPRFAKKHKDPEAP (SEQ ID NO: 11)
>SDBV01087475_1|P
[marine sediment metagenome]
MTKVYKYGALPGGDTLCAQMNLGRVYYNSLVEVENERRTTMWGGDRPPSPATHVCKKSCSTCDKAESKKRKPRKHECKKFCPVCRA
HYKALRKQYRSEPPLDVKPFRKKAAEGGLYWGTYLVIEQDFSAAWKETESFSLVKFRSWRQGDMCAVQIQRDKDPDRMFLIKSAPD
PRKKKQQRYTLRLRVGSKGQAPVWAEPLPFEMHRPLQGTATWVKIARKYVADRVIWSVQFTRRDIPERKDNAERGAVAIDVGWRKT
DDGMRIAYARGDDGAEYELVLPPKWMKHADQADRIRSARDQNLVELQKQERFWSVILAVCGFSNKKLFARLKSTLSVRRVAKPGEH
TKWIKKERHLWQYEAGCRNRSVTRRRNDVRVWLRDLRRRYAHAVIKDSCHKKMKENKTSLPKPARRQGHHAAPGEVIEEITRVFGR
ITGVSVVCAVDTTNHCPACSFVNSYGPERVVTCGGCGVVEDRDRVSTQNMMNMYAIGNVRNPTTRKSTPRFAKKHKDPEAP (SEQ
ID NO: 12)
>SDBV01087475_1|M
[marine sediment metagenome]
MNLGRVYYNSLVEVENERRTTMWGGDRPPSPATHVCKKSCSTCDKAESKKRKPRKHECKKFCPVCRAHYKALRKQYRSEPPLDVKP
FRKKAAEGGLYWGTYLVIEQDFSAAWKETESFSLVKFRSWRQGDMCAVQIQRDKDPDRMFLIKSAPDPRKKKQQRYTLRLRVGSKG
QAPVWAEPLPFEMHRPLQGTATWVKIARKYVADRVIWSVQFTRRDIPERKDNAERGAVAIDVGWRKTDDGMRIAYARGDDGAEYEL
VLPPKWMKHADQADRIRSARDQNLVELQKQERFWSVILAVCGFSNKKLFARLKSTLSVRRVAKPGEHTKWIKKERHLWQYEAGCRN
RSVTRRRNDVRVWLRDLRRRYAHAVIKDSCHKKMKENKTSLPKPARRQGHHAAPGEVIEEITRVFGRITGVSVVCAVDTTNHCPAC
SFVNSYGPERVVTCGGCGVVEDRDRVSTQNMMNMYAIGNVRNPTTRKSTPRFAKKHKDPEAP (SEQ ID NO: 13)
>SRR2657585_2135055_9|M
[marine sediment metagenome]
MKLGREYYNALVEVENKRRQKAWGAETVPAPPHEDCKLPKCLECRDHWRAIRKRVRDEPLIDFKPLRAEFADRGLYWGTYLCIEDA
FARAWKDRDSLRLVKFRSWRHGGIAGVQIQKATWQRSMGTTMFETASAGDTRTGRRARFGGRRVARLRIGSEDRAPLWCEDVPYEQ
HRAIEGRVTWVKIAMKYRGDREIWSVTFTCSDVPERPASDEAARGVVAVDVGWRRIDDDLRIAYARSDQGVVSELRMGPRWRELWE
RADRIRGHRDDHHNELLASGVEVPGQSRSANGLRSDIEKLIAAGENVGPELLAWMHRDRHLAQYETGCRRRSVDCRTDAMRKWARE
LRRTYATVVLKKTSTKKQKETAKENGLVPPARRQGQHAAPGEVLEYLTTTFGRDRTFLVKSKDTTNQCCRCGHVNNHGPETIITCE
QCGDAIDRDEASTQNMMELWVASECEEPTARKTTARFVKRHRKEGSPDNASPPA (SEQ ID NO: 14)
>SRR2657585_2135055_8|P
[marine sediment metagenome]
MATRVYKFGARSPGEATLLRAQMKLGREYYNALVEVENKRRQKAWGAETVPAPPHEDCKLPKCLECRDHWRAIRKRVRDEPLIDFK
PLRAEFADRGLYWGTYLCIEDAFARAWKDRDSLRLVKFRSWRHGGIAGVQIQKATWQRSMGTTMFETASAGDTRTGRRARFGGRRV
ARLRIGSEDRAPLWCEDVPYEQHRAIEGRVTWVKIAMKYRGDREIWSVTFTCSDVPERPASDEAARGVVAVDVGWRRIDDDLRIAY
ARSDQGVVSELRMGPRWRELWERADRIRGHRDDHHNELLASGVEVPGQSRSANGLRSDIEKLIAAGENVGPELLAWMHRDRHLAQY
ETGCRRRSVDCRTDAMRKWARELRRTYATVVLKKTSTKKQKETAKENGLVPPARRQGQHAAPGEVLEYLTTTFGRDRTFLVKSKDT
TNQCCRCGHVNNHGPETIITCEQCGDAIDRDEASTQNMMELWVASECEEPTARKTTARFVKRHRKEGSPDNASPPA (SEQ ID
NO: 15)
>SRR2657585_1667169_1|M
[marine sediment metagenome]
MKVYKFGALRPTENLDKFFEQTQMAHALYQRMVEERNAEREAALEPFKPFSPPHENCYEKRLAAAREKSKQTKKRVKIKRCKKCDD
YWIPIYKEAYKTLEFYKKPTCKEMTAEGLYWGTYQLIAEAFDRADDDTKLMRSIKYRKWPTVKHAVRVQIQDPDKAESYFRVEVVP
DRFDRWREERKRPMPWRVLWIRVGSDGRKPIWLKVPYKEHRPIDGRVTHVTVQRYFIADRERWEVLFTCKSEAERRDSATKGLVAV
DVGWRKMDDGSIRCAYAQDVEGNVSELRLPPEWIERITRADRIRGHRDENLNALLETAGSSLTHGIRSWAGVRRAYRRHLEAGGEK
IAEVEEALKRDRHLWQYELGNRVRAERRRRNDFRVWARELRRCYAVIVTKNTSHKEVKEKANKGPKKLPQKARNQGQHAAPGELIE
TLRRVFGWEGPKITGNALEVSAENTSRICAKCFHENEGSEKRIVVCEKCGVKDDRDHRSTRNMLRDVAAMKVTFGTARKRPSKYAN
RHKKKESSSNASETAS (SEQ ID NO: 16)
>SRR8451930_3283449_6|P
[marine sediment metagenome]
MTKVYKYGALPGGDTLCAQMNLGRVYYNSLVEVENERRTTMWGGDRPPSPATHVCKKSCSTCDKAESKKRKPRKHECKKFCPVCRA
HYKALRKQYRSEPPLDVKPFRKKAAEGGLYWGTYLVIEQDFSAAWKETESFSLVKFRSWRQGDMCAVQIQRDKDPDRMFLIKSAPD
PRKKKQQRYTLRLRVGSKGQAPVWAEPLPFEMHRPLQGTATWVKIARKYVADRVIWSVQFTRRDIPERKDNAERGAVAIDVGWRKT
DDGMRIAYARGDDGAEYELVLPPKWMKHADQADRIRSARDQNLVELQKQERFWSVILAVCGFSNKKLFARLKSTLSVRRVAKPGEH
TKWIKKERHLWQYEAGCRNRSVTRRRNDVRVWLRDLRRRYAHAVIKDSCHKKMKENKTSLPKPARRQGHHAAPGEVIEEITRVFGR
ITGVSVVCAVDTTNHCPACSFVNSYGPERVVTCGGCGVVEDRDRVSTQNMMNMYAIGNVRNPTTRKSTPRFAKKHKDPEAP (SEQ
ID NO: 17)
>SRR8451930_3283449_6|M
[marine sediment metagenome]
MNLGRVYYNSLVEVENERRTTMWGGDRPPSPATHVCKKSCSTCDKAESKKRKPRKHECKKFCPVCRAHYKALRKQYRSEPPLDVKP
FRKKAAEGGLYWGTYLVIEQDFSAAWKETESFSLVKFRSWRQGDMCAVQIQRDKDPDRMFLIKSAPDPRKKKQQRYTLRLRVGSKG
QAPVWAEPLPFEMHRPLQGTATWVKIARKYVADRVIWSVQFTRRDIPERKDNAERGAVAIDVGWRKTDDGMRIAYARGDDGAEYEL
VLPPKWMKHADQADRIRSARDQNLVELQKQERFWSVILAVCGFSNKKLFARLKSTLSVRRVAKPGEHTKWIKKERHLWQYEAGCRN
RSVTRRRNDVRVWLRDLRRRYAHAVIKDSCHKKMKENKTSLPKPARRQGHHAAPGEVIEEITRVFGRITGVSVVCAVDTTNHCPAC
SFVNSYGPERVVTCGGCGVVEDRDRVSTQNMMNMYAIGNVRNPTTRKSTPRFAKKHKDPEAP (SEQ ID NO: 18)
>SRR8452060_665073_11|P
[marine sediment metagenome]
MTKVYKYGALPGGDTLCAQMNLGRVYYNSLVEAENERRTTMWGGDRPPSPATHVCKKSCSTCDKAESKKRKPRKHECKKFCPVCRA
HYKALRKQYRSEPPLDVKPFRKKAAEGGLYWGTYLVIEQDFSAAWKETESFSLVKFRSWRQGDMCAVQIQRDKDPDRMFLIKSAPD
PRKKKQQRYTLRLRVGSKGQAPVWAEPLPFEMHRPLQGTATWVKIARKYVADRVIWSVQFTRRDIPERKDNAERGAVAIDVGWRKT
DDGMRIAYARGDDGAEYELVLPPKWMKHADQADRIRSARDQNLVELQKQERFWSVILAVCGFSNKKLFARLKSTLSVRRVAKPGEH
TKWIKKERHLWQYEAGCRNRSVTRRRNDVRVWLRDLRRRYAHAVIKDSCHKKMKENKTSLPKPARRQGHHAAPGEVIEEITRVFGR
ITGVSVVCAVDTTNHCPACSFVNSYGPERVVTCGGCGVVEDRDRVSTQNMMNMYAIGNVRNPTTRKSTPRFAKKHKDPEAP (SEQ
ID NO: 19)
>SRR8452060_665073_10|M
[marine sediment metagenome]
MNLGRVYYNSLVEAENERRTTMWGGDRPPSPATHVCKKSCSTCDKAESKKRKPRKHECKKFCPVCRAHYKALRKQYRSEPPLDVKP
FRKKAAEGGLYWGTYLVIEQDFSAAWKETESFSLVKFRSWRQGDMCAVQIQRDKDPDRMFLIKSAPDPRKKKQQRYTLRLRVGSKG
QAPVWAEPLPFEMHRPLQGTATWVKIARKYVADRVIWSVQFTRRDIPERKDNAERGAVAIDVGWRKTDDGMRIAYARGDDGAEYEL
VLPPKWMKHADQADRIRSARDQNLVELQKQERFWSVILAVCGFSNKKLFARLKSTLSVRRVAKPGEHTKWIKKERHLWQYEAGCRN
RSVTRRRNDVRVWLRDLRRRYAHAVIKDSCHKKMKENKTSLPKPARRQGHHAAPGEVIEEITRVFGRITGVSVVCAVDTTNHCPAC
SFVNSYGPERVVTCGGCGVVEDRDRVSTQNMMNMYAIGNVRNPTTRKSTPRFAKKHKDPEAP (SEQ ID NO: 20)
>SRR6448207_2353026_47|M
[microbial|Mat metagenome]
MTTTKVLKFWCEPADDDSKELLMQQISLGYTYARSLDDAENTRRRSFRDHLMDVTPFKEAENELTALYESTSKENRDDAFRTKVEL
LRSAKKDVYISSKTTEPFVSKIKEDQDRYRAEVRRIRADLGPRGHGLSFGSYQHEEDAHLQSKSTRAPYLPLIRKRLPKEGTFAVH
LQSEYKAPIQNVLDGSCRWVSIGSEMYSISRKVKYGSRTRDDSKSRGRRLRQVSLRVSGKGGDTKLIKVHALIHRMPVTGTVVWAR
IHTQRTGRKLRYSLQISVDNPVFPADVKNIRTAKSGVIGIDLGWRETDEGFLIATASEQNGNQLPPLIIPKEVALRGITHQRIDSR
CETLQSTRDQKFNDIINRIRHVRDSAADWFREHTQHCHKWRSPGKVVGLFSKWRNNRWNGDDEIFDATSAFIKKDGHLWDWEAHNR
TRMSRQIRGTYQRWADILASNYAEIRIENLDIKQAAEDFRKKAESEHQKDNNKSKSPLIDTRAKLQLAHVGHSLVRSCNRNECNLG
RVDKRYTSRKCHLCGTKGKKTSDKLVFCKNKECALYNCAVDRDIRAALNIASSEVLEWVAGPLAAPKEPKERKNPRRRTKQAETIS
AAA (SEQ ID NO: 21)
>SRR7004342_2720286_9|P
[peat metagenome]
MATKVLKFYCVPASARDNQLLCEQVKLGSMYRRDLAWIENRARELRRAIADWPARDVPIEKRSEWWKSDVGRAASKAWHESDECKR
LKKSITDGQIQAATAARKKARRFDTAWGTCGLAAEAAEAARVALEKEFGLIDKETGQTTFVNTKFPSDEGRVGVQFQRDTDKIDEE
TGEVIPAKKPTIYADELIGGSHNFCRIGSARYSLLDRVDGFQPAALDASGAPIDSFGYKSKQPKGKRFHLLQIRVGTVDKRSTAYP
FDLDPDKGEPIWAKLHVLLHQKTKRPQTLPHERVKWVFVQRVRCALRYRWSVCFVIEDSVVQKPHEQPNDRVAVDLGWRQLFDESG
TPAGIRLLYWMATSPLDLNDPSSPVEGQLVIPQHVVDRKPFSSQLESNRTKNREAMQAMLLAYLQSVSSATWLAKRTAQLASWKKP
SKFVLLLNEWRKNRIAGDQAAFAALEAWNKQDAHLYLWSAPNITKMQRQIQGRVDQFAVQLARRYGIVIVENFKLPDVIEKKDLQE
QDQDAQKLRKKNARRVNVVAPGRARAALKRFATKYNSHYIEEESAFTTVDCASCGHRREFDLKNARAQLLLACDNCGVVEDQDRTA
ARNLLAGASAIARGENGWPLEAKVSKASKKKVVLRRTRKRIVV (SEQ ID NO: 22)
>SRR7004342_2720286_9|M
[peat metagenome]
MYRRDLAWIENRARELRRAIADWPARDVPIEKRSEWWKSDVGRAASKAWHESDECKRLKKSITDGQIQAATAARKKARRFDTAWGT
CGLAAEAAEAARVALEKEFGLIDKETGQTTFVNTKFPSDEGRVGVQFQRDTDKIDEETGEVIPAKKPTIYADELIGGSHNFCRIGS
ARYSLLDRVDGFQPAALDASGAPIDSFGYKSKQPKGKRFHLLQIRVGTVDKRSTAYPFDLDPDKGEPIWAKLHVLLHQKTKRPQTL
PHERVKWVFVQRVRCALRYRWSVCFVIEDSVVQKPHEQPNDRVAVDLGWRQLFDESGTPAGIRLLYWMATSPLDLNDPSSPVEGQL
VIPQHVVDRKPFSSQLESNRTKNREAMQAMLLAYLQSVSSATWLAKRTAQLASWKKPSKFVLLLNEWRKNRIAGDQAAFAALEAWN
KQDAHLYLWSAPNITKMQRQIOGRVDQFAVOLARRYGIVIVENFKLPDVIEKKDLQEQDQDAQKLRKKNARRVNVVAPGRARAALK
RFATKYNSHYIEEESAFTTVDCASCGHRREFDLKNARAQLLLACDNCGVVEDQDRTAARNLLAGASAIARGENGWPLEAKVSKASK
KKWLRRTRKRIW (SEQ ID NO: 23)
>SRR6491179_278020_2|M
[permafrost metagenome]
MIDRLTFDGKCVYVHLAAISLKATKVFTHGGWVFDLAAHTVAFKDIPPVALPENLTLSDGASLTFQLVAPDGTLRKQVRSGVLKSN
DKQPGILRIAGRSKTPANFSAADGWKIEVFKYRAYFTHPGLKTEAGLPEWLQNSIKRQRDFWNRMAWLCRDARRRCSPVPTEEIVA
FVQESVLPAIDEFNNSLGIARSKEKIKHPINLKIEMPGLDAVWKFVGELRKRIAKNRGVPDGLLEKVVAFAEQFKADYGPLNEFIS
NLESIAKIESTALGLRQFEIRPTINSFKAVLDRRKTLKSAWSDGWPHIKYADSPRAADWGVYYYFNKSGVDSARLEAGPGVPGLTF
GRPLKPADTGHKSMKSPKRSSRALREAKISIAGDNREEWAFKFGVLQHRPLPPDSHLKQWSLIYSGGALWLCFTVERKRPLPFPGM
HAAGLDIGWRRTEEGIRFGILYEPESKTFRELSIDLQKSPEDHNNRMPFRIDMGPNRWDKRNITQLLPDWKPGDAIPNTVVVRRAL
GSRRSSYKDAAKVLLQKHLGDQLPVWFDKAGSRGLFKLKENFKDVPVVQEIIDDLQKKTEALNAVAGKYTARYTRELEYGQIQIAH
DVCRHLQQKGVTRLIVEASFVAKASQKQDNEDPASLKNSQKYRQFAAVSKFVSLLKNIAVKYGIAVEVLSAQNTTRICQYCNHLNP
STEKEIFFCEGCGKQVQQDQNAAVNLSRFGIDPELAEMALTFSKD (SEQ ID NO: 24)
>3300028800|Ga0265338_10000470_38|P
[plants-rhizosphere-carex aquatilis]
MTMRVYKFLCLPATAADDHCLREQVRLGARYRRQIALIENRERFLRRALIDYPARDVPVEARGAWWKSEAGKAARDAWHASDEFKA
LRERVFAGKKRALKAVRDATIEAGAMWGTLGKADDAADFARRTIDKAGLIDENGRTTFVGTDFPPDVGRIAVQFQRQNARIDARTG
KTLPAKKSVYADDLIGGEGSWLRIGSVAYSLGAPVDHFRPAAVDAEGRAIDVAGNPGDVIKIGPRAGEAATKGKRFHALAIRVGTV
PGTIRPIWAQMHLLLHQSPRTKNRLQLGHDVVKWAVVRRERTGLRYRWYLTLEVEGSVAVTTPHPHPHDAVAVHIGWRQLFDEEGK
KAGIRLLTWSATAPLDPNDPASPLWGQLVIPEDVLGVKPWADSIHSIRDQNQDVLRDMILAYARSLPATSWLREESRHMHNWRAPS
KYVRLHRQWRDQRIHGDQPAFAALEAWSKQDVHLLHREVPSLERMQRQVEGRVTAVAVQLAKRYGVVARDDFDVTGLVEKDDQHDE
DEQKLRKKTARRVNILGPGRARARVGYFAKKYGSVDLEVDAAGGTLDCAACGHHRDVSREDRVQRVIRCENCGHAEDQDITMSRNL
LAAASAVARGESGWPLDPKVPAPSTKKKAPARRNRRKDQQPLAPSPATP (SEQ ID NO: 25)
>3300031235|Ga0265330_10003750_4 P
[plants-rhizosphere-carex aquatilis]
MTMRVYKFLCLPATAADDHCLREQVRLGARYRRQIALIENRERFLRRALIDYPARDVPVEARGAWWKSEAGKAARDAWHASDEFKA
LRERVFAGKKRALKAVRDATIEAGAMWGTLGKADDAADFARRTIDKAGLIDENGRTTFVGTDFPPDVGRIAVQFQRQNARIDARTG
KTLPAKKSVYADDLIGGEGSWLRIGSVAYSLGAPVDHFRPAAVDAEGRAIDVAGNPGDVIKIGPRAGEAATKGKRFHALAIRVGTV
PGTIRPIWAQMHLLLHQSPRTKNRLQLGHDVVKWAVVRRERTGLRYRWYLTLEVEGSVAVTTPHPHPHDAVAVHIGWRQLFDEEGK
KAGIRLLTWSATAPLDPNDPASPLWGQLVIPEDVLGVKPWADSIHSIRDQNQDVLRDMILAYARSLPATSWLREESRHMHNWRAPS
KYVRLHRQWRDQRIHGDQPAFAALEAWSKQDVHLLHREVPSLERMQRQVEGRVTAVAVQLAKRYGVVARDDFDVTGLVEKDDQHDE
DEQKLRKKTARRVNILGPGRARARVGYFAKKYGSVDLEVDAAGGTLDCAACGHHRDVSREDRVQRVIRCENCGHAEDQDITMSRNL
LAAASAVARGESGWPLDPKVPAPSTKKKAPARRNRRKDQQPLAPSPATP (SEQ ID NO: 26)
>3300031241|Ga0265325_10000012_120|M
[plants-rhizosphere-carex aquatilis]
MTMRVYKFLCLPATAADDHCLREQVRLGARYRRQIALIENRERFLRRALIDYPARDVPVEARGAWWKSEAGKAARDAWHASDEFKA
LRERVFAGKKRALKAVRDATIEAGAMWGTLGKADDAADFARRTIDKAGLIDENGRTTFVGTDFPPDVGRIAVQFQRQNARIDARTG
KTLPAKKSVYADDLIGGEGSWLRIGSVAYSLGAPVDHFRPAAVDAEGRAIDVAGNPGDVIKIGPRAGEAATKGKRFHALAIRVGTV
PGTIRPIWAQMHLLLHQSPRTKNRLQLGHDVVKWAVVRRERTGLRYRWYLTLEVEGSVAVTTPHPHPHDAVAVHIGWRQLFDEEGK
KAGIRLLTWSATAPLDPNDPASPLWGQLVIPEDVLGVKPWADSIHSIRDQNQDVLRDMILAYARSLPATSWLREESRHMHNWRAPS
KYVRLHRQWRDQRIHGDQPAFAALEAWSKQDVHLLHREVPSLERMQRQVEGRVTAVAVQLAKRYGVVARDDFDVTGLVEKDDQHDE
DEQKLRKKTARRVNILGPGRARARVGYFAKKYGSVDLEVDAAGGTLDCAACGHHRDVSREDRVQRVIRCENCGHAEDQDITMSRNL
LAAASAVARGESGWPLDPKVPAPSTKKKAPARRNRRKDQQPLAPSPATP (SEQ ID NO: 27)
>3300031242 Ga0265329_10001065_5|P
[plants-rhizosphere-carex aquatilis]
MTMRVYKFLCLPATAADDHCLREQVRLGARYRRQIALIENRERFLRRALIDYPARDVPVEARGAWWKSEAGKAARDAWHASDEFKA
LRERVFAGKKRALKAVRDATIEAGAMWGTLGKADDAADFARRTIDKAGLIDENGRTTFVGTDFPPDVGRIAVQFQRQNARIDARTG
KTLPAKKSVYADDLIGGEGSWLRIGSVAYSLGAPVDHFRPAAVDAEGRAIDVAGNPGDVIKIGPRAGEAATKGKRFHALAIRVGTV
PGTIRPIWAQMHLLLHQSPRTKNRLQLGHDVVKWAVVRRERTGLRYRWYLTLEVEGSVAVTTPHPHPHDAVAVHIGWRQLFDEEGK
KAGIRLLTWSATAPLDPNDPASPLWGQLVIPEDVLGVKPWADSIHSIRDQNQDVLRDMILAYARSLPATSWLREESRHMHNWRAPS
KYVRLHRQWRDQRIHGDQPAFAALEAWSKQDVHLLHREVPSLERMQRQVEGRVTAVAVQLAKRYGVVARDDFDVTGLVEKDDQHDE
DEQKLRKKTARRVNILGPGRARARVGYFAKKYGSVDLEVDAAGGTLDCAACGHHRDVSREDRVQRVIRCENCGHAEDQDITMSRNL
LAAASAVARGESGWPLDPKVPAPSTKKKAPARRNRRKDQQPLAPSPATP (SEQ ID NO: 28)
>3300031247|Ga0265340_10001032_18|P
[plants-rhizosphere-carex aquatilis]
MTMRVYKFLCLPATAADDHCLREQVRLGARYRRQIALIENRERFLRRALIDYPARDVPVEARGAWWKSEAGKAARDAWHASDEFKA
LRERVFAGKKRALKAVRDATIEAGAMWGTLGKADDAADFARRTIDKAGLIDENGRTTFVGTDFPPDVGRIAVQFQRQNARIDARTG
KTLPAKKSVYADDLIGGEGSWLRIGSVAYSLGAPVDHFRPAAVDAEGRAIDVAGNPGDVIKIGPRAGEAATKGKRFHALAIRVGTV
PGTIRPIWAQMHLLLHQSPRTKNRLQLGHDVVKWAVVRRERTGLRYRWYLTLEVEGSVAVTTPHPHPHDAVAVHIGWRQLFDEEGK
KAGIRLLTWSATAPLDPNDPASPLWGQLVIPEDVLGVKPWADSIHSIRDQNQDVLRDMILAYARSLPATSWLREESRHMHNWRAPS
KYVRLHRQWRDQRIHGDQPAFAALEAWSKQDVHLLHREVPSLERMQRQVEGRVTAVAVQLAKRYGVVARDDFDVTGLVEKDDQHDE
DEQKLRKKTARRVNILGPGRARARVGYFAKKYGSVDLEVDAAGGTLDCAACGHHRDVSREDRVQRVIRCENCGHAEDQDITMSRNL
LAAASAVARGESGWPLDPKVPAPSTKKKAPARRNRRKDQQPLAPSPATP (SEQ ID NO: 29)
>3300031250 Ga0265331_10001842_6|P
[plants-rhizosphere-carex aquatilis]
MTMRVYKFLCLPATAADDHCLREQVRLGARYRRQIALIENRERFLRRALIDYPARDVPVEARGAWWKSEAGKAARDAWHASDEFKA
LRERVFAGKKRALKAVRDATIEAGAMWGTLGKADDAADFARRTIDKAGLIDENGRTTFVGTDFPPDVGRIAVQFQRQNARIDARTG
KTLPAKKSVYADDLIGGEGSWLRIGSVAYSLGAPVDHFRPAAVDAEGRAIDVAGNPGDVIKIGPRAGEAATKGKRFHALAIRVGTV
PGTIRPIWAQMHLLLHQSPRTKNRLQLGHDVVKWAVVRRERTGLRYRWYLTLEVEGSVAVTTPHPHPHDAVAVHIGWRQLFDEEGK
KAGIRLLTWSATAPLDPNDPASPLWGQLVIPEDVLGVKPWADSIHSIRDQNQDVLRDMILAYARSLPATSWLREESRHMHNWRAPS
KYVRLHRQWRDQRIHGDQPAFAALEAWSKQDVHLLHREVPSLERMQRQVEGRVTAVAVQLAKRYGVVARDDFDVTGLVEKDDQHDE
DEQKLRKKTARRVNILGPGRARARVGYFAKKYGSVDLEVDAAGGTLDCAACGHHRDVSREDRVQRVIRCENCGHAEDQDITMSRNL
LAAASAVARGESGWPLDPKVPAPSTKKKAPARRNRRKDQQPLAPSPATP (SEQ ID NO: 30)
>3300031344 Ga0265316_10000001557|P
[plants-rhizosphere-carex aquatilis]
MTMRVYKFLCLPATAADDHCLREQVRLGARYRRQIALIENRERFLRRALIDYPARDVPVEARGAWWKSEAGKAARDAWHASDEFKA
LRERVFAGKKRALKAVRDATIEAGAMWGTLGKADDAADFARRTIDKAGLIDENGRTTFVGTDFPPDVGRIAVQFQRQNARIDARTG
KTLPAKKSVYADDLIGGEGSWLRIGSVAYSLGAPVDHFRPAAVDAEGRAIDVAGNPGDVIKIGPRAGEAATKGKRFHALAIRVGTV
PGTIRPIWAQMHLLLHQSPRTKNRLQLGHDVVKWAVVRRERTGLRYRWYLTLEVEGSVAVTTPHPHPHDAVAVHIGWRQLFDEEGK
KAGIRLLTWSATAPLDPNDPASPLWGQLVIPEDVLGVKPWADSIHSIRDQNQDVLRDMILAYARSLPATSWLREESRHMHNWRAPS
KYVRLHRQWRDQRIHGDQPAFAALEAWSKQDVHLLHREVPSLERMQRQVEGRVTAVAVQLAKRYGVVARDDFDVTGLVEKDDQHDE
DEQKLRKKTARRVNILGPGRARARVGYFAKKYGSVDLEVDAAGGTLDCAACGHHRDVSREDRVQRVIRCENCGHAEDQDITMSRNL
LAAASAVARGESGWPLDPKVPAPSTKKKAPARRNRRKDQQPLAPSPATP (SEQ ID NO: 31)
>3300031733|Ga0316577_10033675_3|M
[plants-rhizosphere-spartina alterniflora]
MPTLVYKYGARSSQDSALLDQMRLGRRYYNALVEAENDRRRAAWGGDHPPAPDDPHETCVCDECVQEPNPEHTSCRCKTCKAHWKA
VRQRVLDTPPLDVKPLYAEARAQGLHWGTCLAIGQAFSAAWTKTSALRTVRFRSWRQGDVAAVQIQLTNKPDSLVRLCKAPDARTG
RRARNGLGRHTVQIRIGSNADRSPIFCDPIRIEKHRELSGRIAWVHVRRKRIADREVWSVAFTCNEADARTDEAHEGVVAVDVSWR
KLPDGSWRLGYAQDDAGNVSELLLPPEWAERAERAERIRSHRDARLNELKAKMPLLAHTKSCRKAVEKLLRLGVLPLELSEWIARD
THLWQYETGCWRRSASRRRAALQEWVRMLRQTYAIVIVKDSQHKLMKEKHDLPQPAQRQGQHAAPGETVENLRRVFGMTGMKVVSA
VDTTTTCVQCGHVTPINGQRFVHCERCGDRRDRDHASTRNMLQLYKNGAYKSPTARKTTSRFAKKHTKKDVPPEC (SEQ ID
NO: 32)
>SRR8543844_2229942_334|P
[rhizosphere metagenome]
MTMRVYKFLCLPATAADDHCLREQVRLGARYRRQIALIENRERFLRRALIDYPARDVPVEARGAWWKSEAGKAARDAWHASDEFKA
LRERVFAGKKRALKAVRDATIEAGAMWGTLGKADDAADFARRTIDKAGLIDENGRTTFVGTDFPPDVGRIAVQFQRQNARIDARTG
KTLPAKKSVYADDLIGGEGSWLRIGSVAYSLGAPVDHFRPAAVDAEGRAIDVAGNPGDVIKIGPRAGEAATKGKRFHALAIRVGTV
PGTIRPIWAQMHLLLHQSPRTKNRLQLGHDVVKWAVVRRERTGLRYRWYLTLEVEGSVAVTTPHPHPHDAVAVHIGWRQLFDEEGK
KAGIRLLTWSATAPLDPNDPASPLWGQLVIPEDVLGVKPWADSIHSIRDQNQDVLRDMILAYARSLPATSWLREESRHMHNWRAPS
KYVRLHRQWRDQRIHGDQPAFAALEAWSKQDVHLLHREVPSLERMQRQVEGRVTAVAVQLAKRYGVVARDDFDVTGLVEKDDQHDE
DEQKLRKKTARRVNILGPGRARARVGYFAKKYGSVDLEVDAAGGTLDCAACGHHRDVSREDRVQRVIRCENCGHAEDQDITMSRNL
LAAASAVARGESGWPLDPKVPAPSTKKKAPARRNRRKDQQPLAPSPATP (SEQ ID NO: 33)
>SRR8543847_1991039_375|P
[rhizosphere metagenome]
MTMRVYKFLCLPATAADDHCLREQVRLGARYRRQIALIENRERFLRRALIDYPARDVPVEARGAWWKSEAGKAARDAWHASDEFKA
LRERVFAGKKRALKAVRDATIEAGAMWGTLGKADDAADFARRTIDKAGLIDENGRTTFVGTDFPPDVGRIAVQFQRQNARIDARTG
KTLPAKKSVYADDLIGGEGSWLRIGSVAYSLGAPVDHFRPAAVDAEGRAIDVAGNPGDVIKIGPRAGEAATKGKRFHALAIRVGTV
PGTIRPIWAQMHLLLHQSPRTKNRLQLGHDVVKWAVVRRERTGLRYRWYLTLEVEGSVAVTTPHPHPHDAVAVHIGWRQLFDEEGK
KAGIRLLTWSATAPLDPNDPASPLWGQLVIPEDVLGVKPWADSIHSIRDQNQDVLRDMILAYARSLPATSWLREESRHMHNWRAPS
KYVRLHRQWRDQRIHGDQPAFAALEAWSKQDVHLLHREVPSLERMQRQVEGRVTAVAVQLAKRYGVVARDDFDVTGLVEKDDQHDE
DEQKLRKKTARRVNILGPGRARARVGYFAKKYGSVDLEVDAAGGTLDCAACGHHRDVSREDRVQRVIRCENCGHAEDQDITMSRNL
LAAASAVARGESGWPLDPKVPAPSTKKKAPARRNRRKDQQPLAPSPATP (SEQ ID NO: 34)
>SRR8543989_2137428_34|M
[rhizosphere metagenome]
MTMRVYKFLCLPATAADDHCLREQVRLGARYRRQIALIENRERFLRRALIDYPARDVPVEARGAWWKSEAGKAARDAWHASDEFKA
LRERVFAGKKRALKAVRDATIEAGAMWGTLGKADDAADFARRTIDKAGLIDENGRTTFVGTDFPPDVGRIAVQFQRQNARIDARTG
KTLPAKKSVYADDLIGGEGSWLRIGSVAYSLGAPVDHFRPAAVDAEGRAIDVAGNPGDVIKIGPRAGEAATKGKRFHALAIRVGTV
PGTIRPIWAQMHLLLHQSPRTKNRLQLGHDVVKWAVVRRERTGLRYRWYLTLEVEGSVAVTTPHPHPHDAVAVHIGWRQLFDEEGK
KAGIRLLTWSATAPLDPNDPASPLWGQLVIPEDVLGVKPWADSIHSIRDQNQDVLRDMILAYARSLPATSWLREESRHMHNWRAPS
KYVRLHRQWRDQRIHGDQPAFAALEAWSKQDVHLLHREVPSLERMQRQVEGRVTAVAVQLAKRYGVVARDDFDVTGLVEKDDQHDE
DEQKLRKKTARRVNILGPGRARARVGYFAKKYGSVDLEVDAAGGTLDCAACGHHRDVSREDRVQRVIRCENCGHAEDQDITMSRNL
LAAASAVARGESGWPLDPKVPAPSTKKKAPARRNRRKDQQPLAPSPATP (SEQ ID NO: 35)
>SRR8543995_2079833_6|M
[rhizosphere metagenome]
MTMRVYKFLCLPATAADDHCLREQVRLGARYRRQIALIENRERFLRRALIDYPARDVPVEARGAWWKSEAGKAARDAWHASDEFKA
LRERVFAGKKRALKAVRDATIEAGAMWGTLGKADDAADFARRTIDKAGLIDENGRTTFVGTDFPPDVGRIAVQFQRQNARIDARTG
KTLPAKKSVYADDLIGGEGSWLRIGSVAYSLGAPVDHFRPAAVDAEGRAIDVAGNPGDVIKIGPRAGEAATKGKRFHALAIRVGTV
PGTIRPIWAQMHLLLHQSPRTKNRLQLGHDVVKWAVVRRERTGLRYRWYLTLEVEGSVAVTTPHPHPHDAVAVHIGWRQLFDEEGK
KAGIRLLTWSATAPLDPNDPASPLWGQLVIPEDVLGVKPWADSIHSIRDQNQDVLRDMILAYARSLPATSWLREESRHMHNWRAPS
KYVRLHRQWRDQRIHGDQPAFAALEAWSKQDVHLLHREVPSLERMQRQVEGRVTAVAVQLAKRYGVVARDDFDVTGLVEKDDQHDE
DEQKLRKKTARRVNILGPGRARARVGYFAKKYGSVDLEVDAAGGTLDCAACGHHRDVSREDRVQRVIRCENCGHAEDQDITMSRNL
LAAASAVARGESGWPLDPKVPAPSTKKKAPARRNRRKDQQPLAPSPATP (SEQ ID NO: 36)
>SRR8544146_618080_5|P
[rhizosphere metagenome]
MTMRVYKFLCLPATAADDHCLREQVRLGARYRRQIALIENRERFLRRALIDYPARDVPVEARGAWWKSEAGKAARDAWHASDEFKA
LRERVFAGKKRALKAVRDATIEAGAMWGTLGKADDAADFARRTIDKAGLIDENGRTTFVGTDFPPDVGRIAVQFQRQNARIDARTG
KTLPAKKSVYADDLIGGEGSWLRIGSVAYSLGAPVDHFRPAAVDAEGRAIDVAGNPGDVIKIGPRAGEAATKGKRFHALAIRVGTV
PGTIRPIWAQMHLLLHQSPRTKNRLQLGHDVVKWAVVRRERTGLRYRWYLTLEVEGSVAVTTPHPHPHDAVAVHIGWRQLFDEEGK
KAGIRLLTWSATAPLDPNDPASPLWGQLVIPEDVLGVKPWADSIHSIRDQNQDVLRDMILAYARSLPATSWLREESRHMHNWRAPS
KYVRLHRQWRDQRIHGDQPAFAALEAWSKQDVHLLHREVPSLERMQRQVEGRVTAVAVQLAKRYGVVARDDFDVTGLVEKDDQHDE
DEQKLRKKTARRVNILGPGRARARVGYFAKKYGSVDLEVDAAGGTLDCAACGHHRDVSREDRVQRVIRCENCGHAEDQDITMSRNL
LAAASAVARGESGWPLDPKVPAPSTKKKAPARRNRRKDQQPLAPSPATP (SEQ ID NO: 37)
>SRR6963591_1323413_2|M
[sediment metagenome]
MKVFKYGARPVNQESLIRDQMKLARNYYNKLVETENKRRQQAWGSEKPPPPPHPPEEVVLPDGSKKTKWCRCEECKTHWKTLREAY
YALDNLDKKPLRAAASSWGLYWGSYLLVEQAFDQAQKTTVYYDPVRFRGWRKGGQAGLQIQNGKNTDSLFKVEEIPDPEPSARSKK
NDRRAGKGKRRGQLRTLRIRIGTEGRTPIWSDPIIFKMHRPLEGTVCWLKICMFYRGDREIWSVNFTCKDTSPRTDSATDGVVAID
VSWRQLPNGDIRLAYARGDNGFEDELTLDNSWLERIKKAERIQSHRDERLNDLKTSDSRFRLFKSPRSARIHIMKNQIAELEDWAK
REKHLEQYELGCKRKTYDVRRDAVRVWLRKLRRLYQTVVIKDSSHKEMKEQAKAKKKLHRAARKQGHHGAPGEIVEEICKVFGRIE
NVAVVIAENTTATCPVCGHMHEVNKERMITCERCGTTDDRDRISTHNLLSRFFDGQYEKPTARKTESKFAKKHKKVEQEVKHLRDG
L (SEQ ID NO: 38)
>SRR7976138_3273187_71|P
[soi1|Metagenome]
MMCFQYWAEPVDETSKALLAHQLREGAMYRRILATLENRARFLLGGLMRLTKEDRAPWRARIYVAHAQAVRDERAAASARGLTWGT
YLAIEDALDQSQRTKARGAMLGTFAPRDEGIVGVHIQNREISARAVVGGEDKYVRIDPELVGKPTLRSRREGTAMGARRLNILSIR
VGSKGPRGLEPVWARFYVLMNRPLPDASLKWVKLRCRRIGTTYRWQANFVVGAPCVGTPNPDRLPGVGIDLGWRKRADGIRIAYYA
DTEGRHGELVIPQHVIARDAKSDSLRRIRDQARNQIQAVLADLRTRLASRKAVSSIPPVEGTAVTPAWWRWTCGLAVGMALLTPTE
AWFLEQTQFLHAWRKVSRLVWLHRQWRERRFAGDEDAFLLMDDYIRQDRHLFNWEAYNRRRLTAEVEGRVREFAVSLAKRYDMIAV
EEAGIVSKLVQKQAEPEPRDEALRAVAAKRMHACSPASVREQIVRFGGKYGAKVMQIDPANTTKTCDACGQIRAPADPEQLVLGCE
HCGHVQDQDHSAARTLLASGLVMALEGAATKGRTPRKMGARRTRKKAQVEIARDA (SEQ ID NO: 39)
>SRR7976138_3273187_70|M
[soi1|Metagenome]
MAVADPEGIEIMMCFQYWAEPVDETSKALLAHQLREGAMYRRILATLENRARFLLGGLMRLTKEDRAPWRARIYVAHAQAVRDERA
AASARGLTWGTYLAIEDALDQSQRTKARGAMLGTFAPRDEGIVGVHIQNREISARAVVGGEDKYVRIDPELVGKPTLRSRREGTAM
GARRLNILSIRVGSKGPRGLEPVWARFYVLMNRPLPDASLKWVKLRCRRIGTTYRWQANFVVGAPCVGTPNPDRLPGVGIDLGWRK
RADGIRIAYYADTEGRHGELVIPQHVIARDAKSDSLRRIRDQARNQIQAVLADLRTRLASRKAVSSIPPVEGTAVTPAWWRWTCGL
AVGMALLTPTEAWFLEQTQFLHAWRKVSRLVWLHRQWRERRFAGDEDAFLLMDDYIRQDRHLFNWEAYNRRRLTAEVEGRVREFAV
SLAKRYDMIAVEEAGIVSKLVQKQAEPEPRDEALRAVAAKRMHACSPASVREQIVRFGGKYGAKVMQIDPANTTKTCDACGQIRAP
ADPEQLVLGCEHCGHVQDQDHSAARTLLASGLVMALEGAATKGRTPRKMGARRTRKKAQVEIARDA (SEQ ID NO: 40)
>3300012943|Ga0164241_10000441_40|P
[terrestrial-soil]
MMCFQYWAEPVDETSKALLAHQLREGAMYRRILATLENRARFLLGGLMRLTKEDRAPWRARIYVAHAQAVRDERAAASARGLTWGT
YLAIEDALDQSQRTKARGAMLGTFAPRDEGIVGVHIQNREISARAVVGGEDKYVRIDPELVGKPTLRSRREGTAMGARRLNILSIR
VGSKGPRGLEPVWARFYVLMNRPLPDASLKWVKLRCRRIGTTYRWQANFVVGAPCVGTPNPDRLPGVGIDLGWRKRADGIRIAYYA
DTEGRHGELVIPQHVIARDAKSDSLRRIRDQARNQIQAVLADLRTRLASRKAVSSIPPVEGTAVTPAWWRWTCGLAVGMALLTPTE
AWFLEQTQFLHAWRKVSRLVWLHRQWRERRFAGDEDAFLLMDDYIRQDRHLFNWEAYNRRRLTAEVEGRVREFAVSLAKRYDMIAV
EEAGIVSKLVQKQAEPEPRDEALRAVAAKRMHACSPASVREQIVRFGGKYGAKVMQIDPANTTKTCDACGQIRAPADPEQLVLGCE
HCGHVQDQDHSAARTLLASGLVMALEGAATKGRTPRKMGARRTRKKAQVEIARDA (SEQ ID NO: 41)
>3300012943|Ga0164241_10000441_39|M
[terrestrial-soil]
MAVADPEGIEIMMCFQYWAEPVDETSKALLAHQLREGAMYRRILATLENRARFLLGGLMRLTKEDRAPWRARIYVAHAQAVRDERA
AASARGLTWGTYLAIEDALDQSQRTKARGAMLGTFAPRDEGIVGVHIQNREISARAVVGGEDKYVRIDPELVGKPTLRSRREGTAM
GARRLNILSIRVGSKGPRGLEPVWARFYVLMNRPLPDASLKWVKLRCRRIGTTYRWQANFVVGAPCVGTPNPDRLPGVGIDLGWRK
RADGIRIAYYADTEGRHGELVIPQHVIARDAKSDSLRRIRDQARNQIQAVLADLRTRLASRKAVSSIPPVEGTAVTPAWWRWTCGL
AVGMALLTPTEAWFLEQTQFLHAWRKVSRLVWLHRQWRERRFAGDEDAFLLMDDYIRQDRHLFNWEAYNRRRLTAEVEGRVREFAV
SLAKRYDMIAVEEAGIVSKLVQKQAEPEPRDEALRAVAAKRMHACSPASVREQIVRFGGKYGAKVMQIDPANTTKTCDACGQIRAP
ADPEQLVLGCEHCGHVQDQDHSAARTLLASGLVMALEGAATKGRTPRKMGARRTRKKAQVEIARDA (SEQ ID NO: 42)
>3300031949|Ga0214473_10000008_352|M
[terrestrial-soil]
MRVYKFLCIPATAADDRALRDQVYLGSRYRRQSALIENRARVLQRGIADRPALNVPEKDRSAWWKSEEGKAARDAWYASDECKMLR
EIIFAEKKRALKAARDAAIEAGTMWGTCGKADDAADFARRAVDKNGLIDEDGQTTFVDTHFPADVGRIAVQFQRGNERIDTRTGKK
IPAKKLIYADDLIGDEDTRLRIGTVAYALAEPVDGFRPAAIDAEGKAIDVYTRGLSEREQDLLARDQREEAIAAYAARTPASIDPS
GNICKTPEQKAVTKIVRWERGERDEKGKRYHSLAIRVGTMPGTIRPIWAHLHVMLHQSPRSKNQLVLGHDVVKWAVIRRERTGLRY
RWFLTLETEGDVAVTSPHPQPHDAIAVHIGWRQLFSEAGDPAGIRVLTWSASAPLDPDDPRSPREGQLVLPQEVVDQKPFADRIHS
TRDKNQDVLRDMILVYARSLPTSSWLRVEAAHMHQWRAPRKYVRLYCQWKEQRIHGDQAAFAALEAWIKQDRHLLHREAPSIERMK
RQIEGRVTALAVQLAKRYGVVASDNIAVGELVKKDDRHDEDEQKLRKKTARRVNVVAPGEARALVRYFAKKYGCVGLELDAAGGTI
DCDACGHRRDVAREDRVQRMIRCENCGHVEDQDLTMSRNLLSGASAVARGESGWPLAPKVPAASTKKRATVRRNRRRGQQPLASSV
GTP (SEQ ID NO: 43)
>3300031965|Ga0326597_10001868_12|M
[terrestrial-soil]
MIEDAFAMACKDRSVLRLVKFRSWRDGGVAAVQIQRAAWERDGGASMYRTRAQVDNRTGRRTKHGGRQTLEIRIGSDGRNPIWSEP
VRYEQHREAVGRPTWIKVSMKYRGDLEVWSVVVTCADVPPRPASEEAQRGVVAVDVGFRRVGDDIRIAYARDDRGKVSELLMDARW
RELCNRADRIRGHRDDNFNALQEADSENLFSLTKSANGARQKIERLVREGEEVSQEMRAWMHRDRHLSQYEDGCRRRSVNARKDAM
RKWARELRRNYSQLVLSKTAVKKMKENAKDDGLPKPARRQGQNAAPGELLDWLVMVFGRAEVAIVKPIHTTDTCVSCEHVNDHGPE
TIVVCEECGAALDRDEASTRNMMDLWVNGECEKPTARKASAKFAKKHKTEDKDDNASPAA (SEQ ID NO: 44)
>3300006795|Ga0075520_1037237_1|M
[terrestrial-soil-arctic peat soil]
MAFVRETILPEIDAFNDALGRSKAKIKHPAKLKTEMPGIDGLWHFVGQLRTRIEKGRAVPEGLLEKIIAFAEQFKPDYTLLNEFLN
NYRDIAAKEATALGLLRYEIRPTVNGFKAVLDRRKTTKAAWSEGWPLIKYPDSPKAANWGLHYYFNMAGLDSAQIESPKGVPGLTF
GPHLKSSDTGHELLTGLAATKRSLRAAEISISGSNHERCTFRFAVLYHRPLPAGSHLKEWKLIYADGALWLCLTVELQHPVPVHSP
LAAGLDVGWRRTEEGLRFGTLYEPATMSFRELSIDMQKSPKDHKDRMPFRIDIGPTRWEKRNILQLLPDWKPGNPIPSSFETRTAV
QSRRDYYKDTAKILLRKHLGESMPAWIDKAGRRGLLKLAEEFKEDQVVQNILGTWMQQDEQVGKLVSMYLARSTKRLEYGHAQVAH
DVCRHLLDKGVHRLIVETSFLAKVSQRHDNEDSEGLKRSQKYRQFAAVGKFVAVLKNTAIKYGIVVEELSTINTTRICQYCNHLNP
GTGKEYFTCEKCERQIKQDHNAAVNISRFGCDPELAEMAASAG (SEQ ID NO: 45)
>3300014491|Ga0182014_10039677_1|P
[terrestrial-soil-bog]
MIDRLTFDGKCVYVHLAAISLKATKVFTHGGWVFDLAAHTVAFKDIPPVALPENLTLSDGASLTFQLVAPDGTLRKQVRSGVLKSN
DKQPGILRIAGRSKTPANFSAADGWKIEVFKYRAYFTHPGLKTEAGLPEWLQNSIKRQRDFWNRMAWLCRDARRRCSPVPTEEIVA
FVQESVLPAIDEFNNSLGIARSKEKIKHPINLKIEMPGLDAVWKFVGELRKRIAKNRGVPDGLLEKVVAFAEQFKADYGPLNEFIS
NLESIAKIESTALGLRQFEIRPTINSFKAVLDRRKTLKSAWSDGWPHIKYADSPRAADWGVYYYFNKSGVDSARLEAGPGVPGLTF
GRPLKPADTGHKSMKSPKRSSRALREAKISIAGDNREEWAFKFGVLQHRPLPPDSHLKQWSLIYSGGALWLCFTVERKRPLPFPGM
HAAGLDIGWRRTEEGIRFGILYEPESKTFRELSIDLQKSPEDHNNRTPFRIDMGPNRWDKRNITQLLPDWKPGDAIPNTVVVRRAL
GSRRSSYKDAAKVLLQKHLGDQLPVWFDKAGSRGLFKLKENFKDVPVVQEIIDDLQKKTEALNAVAGKYTARYTRELEYGQIQIAH
DVCRHLQQKGVTRLIVEASFVAKASQKQDNEDPASLKNSQKYRQFAAVSKFVSLLKNIAVKYGIAVEVLSAQNTTRICQYCNHLNP
STEKEIFFCEGCGKQVQQDQNAAVNLSRFGIDPELAEMALTFSKD (SEQ ID NO: 46)
>3300014491|Ga0182014_10071250_1|M
[terrestrial-soil-bog]
MAFVRETILPEIDAFNDALGRSKAKIKHPAKLKTEMPGPDGLWNFVGQLRTRIEKGRAVPEGLLEKIIAFAEQFKPDYTPLNEFLN
KYHNIAAKEATDLGLLRYEIRPTVSGFKAVLDRRKTTKAAWSEGWPLIKYPDSPKAANWGVHYYFNTAGLDSAQIESPKGVPGLTL
GPHLKPSDTGHELLTGLAATKRSLRAAEISISGPNHEQCTFRFGVLYHRPLPAGSHLKEWKLIYADGALWLCLTVELQHPVPVHSP
LAAGLDVGWRRTEEGLRFGTLYEPATMSFRELSIDMQKSPKDHKDRMPFRIDIGPTRWEKRNILQLLPDWKPGNPIPSSFETRTAM
QSRRDYYKDTAKILLRKHLGESMPAWIDKAGRRGLLKLVEEFKEDEVVQNILGTWKQQDEEVGKLVSMYLARSTKRLEYGQAQVAH
DVCRYLHDKGVHRLIVETSFLAKVSQRHDNEDSEGLKRSQKYRQFAAVGKFVAVLKNTAIKYGIVVEELSAINTTRICQYCNHLNP
GTEKEHFTCEKCERQIKQDHNAAVNISRFGCDPELAEMAASAG (SEQ ID NO: 47)
>3300017975Ga0187782_10004712_9|P
[terrestrial-soil-tropical peatland]
MATKVLKFYCVPASARDNQLLCEQVKLGSMYRRDLAWIENRARELRRAIADWPARDVPIEKRSEWWKSDVGRAASKAWHESDECKR
LKKSITDGQIQAATAARKKARRFDTAWGTCGLAAEAAEAARVALEKEFGLIDKETGQTTFVNTKFPSDEGRVGVQFQRDTDKIDEE
TGEVIPAKKPTIYADELIGGSHNFCRIGSARYSLLDRVDGFQPAALDASGAPIDSFGYKSKQPKGKRFHLLQIRVGTVDKRSTAYP
FDLDPDKGEPIWAKLHVLSHQKTKRPQTLPHERVKWVFVQRVRCALRYRWSVCFVIEDSVVQKPHEQPNDRVAVDLGWRQLFDESG
TPAGIRLLYWMATSPLDLNDPSSPVEGQLVIPQHVVDRKPFSSQLESNRTKNREAMQAMLLAYLQSVSSATWLAKRTAQLASWKKP
SKFVLLLNEWRKNRIAGDQAAFAALEAWNKQDAHLYLWSAPNITKMQRQIQGRVDQFAVQLARRYGIVIVENFKLPDVIEKKDLQE
QDQDAQKLRKKNARRVNVVAPGRARAALKRFATKYNSHYIEEESAFTTVDCASCGHRREFDLKNARAQLLLACDNCGVVEDQDRTA
ARNLLAGASAIARGENGWPLEAKVSKASKKKVVLRRTRKRIVV (SEQ ID NO: 48)
>3300017975|Ga0187782_10004712_9|M
[terrestrial-soil-tropical peatland]
MYRRDLAWIENRARELRRAIADWPARDVPIEKRSEWWKSDVGRAASKAWHESDECKRLKKSITDGQIQAATAARKKARRFDTAWGT
CGLAAEAAEAARVALEKEFGLIDKETGQTTFVNTKFPSDEGRVGVQFQRDTDKIDEETGEVIPAKKPTIYADELIGGSHNFCRIGS
ARYSLLDRVDGFQPAALDASGAPIDSFGYKSKQPKGKRFHLLQIRVGTVDKRSTAYPFDLDPDKGEPIWAKLHVLSHQKTKRPQTL
PHERVKWVFVQRVRCALRYRWSVCFVIEDSVVQKPHEQPNDRVAVDLGWRQLFDESGTPAGIRLLYWMATSPLDLNDPSSPVEGQL
VIPQHVVDRKPFSSQLESNRTKNREAMQAMLLAYLQSVSSATWLAKRTAQLASWKKPSKFVLLLNEWRKNRIAGDQAAFAALEAWN
KQDAHLYLWSAPNITKMQRQIQGRVDQFAVQLARRYGIVIVENFKLPDVIEKKDLQEQDQDAQKLRKKNARRVNVVAPGRARAALK
RFATKYNSHYIEEESAFTTVDCASCGHRREFDLKNARAQLLLACDNCGVVEDQDRTAARNLLAGASAIARGENGWPLEAKVSKASK
KKVVLRRTRKRIVV (SEQ ID NO: 49)
>SRR7027835_762984_1|M
[wetland metagenome]
MAWLCRETRLKCSPVPTDKIVDFVQNAILPEIDAFNSAPGRSRERMKHPAKLKIETPGLDCLWGFVGELRARTGKGRAVPAGLLDK
VVEFAQQFKTDYTPFNEFIAGFQAIAEREAAALGLRHFEIRPTVGAFKAVLDRRKTTKAHWSEGWPLIKYPDSPKAANWGLHYHLN
KAGVDSALLEREEGIPGLSFGPRLKPADTGHEKLTGVAAKRILREAQISISGDNDERWTFHFGVLQHRPLPPNSHLKEWKLIFQGG
ALWLCLVVELQRPVPVPGPHPAGLDIGWRRTEEGIRFGTLYEPATKTIRELTVDLQKSPCDHKDRVPFRIDLGPSRWEMRNATELV
PDWKPGQPIPSAFETRSVLQIRRDRIKETAKRQLREHLGERLPVWFDKAGRRGLLKLAQDFKNESAVCEILNIWQQKDEQLGKLAS
MYFDRSTKRIEYGHAQVAHDVCRFLQQKGVMRLIVETSFLSKVSQHQDNEDLVSIERSQKYRQFVAVGKFLAALKNTTRKYGIVVE
TVNAMNTTRTCQYCNALNPRTEEEQFTCKRCGRQVQQDHNAAVNLSRFGSDPVLAEMALHADEV (SEQ ID NO: 50)

TABLE 4
Nucleotide sequences of Representative CLUST. 133120 Direct Repeats

| CLUST.133120 Effector Protein | | Spacer |
|---|---|---|
| Accession | Direct Repeat Nucleotide Sequence | Length(s) |
| 3300027740\|Ga0214474_1000103_171 | CCAACCAATGCCAGCGCGACGGCTTATGAGTCG | 35-36 |
| M (SEQ ID NO: 1) | CGAC (SEQ ID NO: 51) | |
| | GTCGCGACTCATAAGCCGTCGCGCTGGCATTGG | |
| | TTGG (SEQ ID NO: 95) | |
| 3300017971 \|Ga018043 8_10084474_2\| | GGTAAAACACCTGCGAGATGGTTTATGAATCTC | 36-41 |
| M (SEQ ID NO: 2) | GAC (SEQ ID NO: 52) | |
| | GTCGAGATTCATAAACCATCTCGCAGGTGTTTT | |
| | ACC (SEQ ID NO: 96) | |
| 3300022592\|Ga0236342_1001376_7\|P | AGTGCATCGAACAGATGCAAC (SEQ ID NO: | 24-51 |
| (SEQ ID NO: 3) | 53) | |
| | GTTGCATCTGTTCGATGCACT (SEQ ID NO: | |
| | 97) | |
| 3300020171\|Ga0180732_1000630_46\| | AATGCCAGCCCAACGGCCTAGAAGTTGGGAC | 26-52 |
| P (SEQ ID NO: 4) | (SEQ ID NO: 54) | |
| | GTCCCAACTTCTAGGCCGTTGGGCTGGCATT | |
| | (SEQ ID NO: 98) | |
| 3300018040\|Ga0187862_10024620_1\| | GTAACAGTGGCATCACAGTGCATTGAATAGATG | 34-46 |
| M (SEQ ID NO: 5) | CAAC (SEQ ID NO: 55) | |
| | GTTGCATCTATTCAATGCACTGTGATGCCACTG | |
| | TTAC (SEQ ID NO: 99) | |
| 3300005253\|Ga0073583_1150562_58\| | GTAGCAATGGCAGCGCATCGCCTTTTAAGATGC | 24-39 |
| P (SEQ ID NO: 6) | GAC (SEQ ID NO: 56) | |
| | GTCGCATCTTAAAAGGCGATGCGCTGCCATTGC | |
| | TAC (SEQ ID NO: 100) | |
| 3300005253\|Ga0073583_1150562_51\| | GTAGCAATGGCAGCGCATCGCCTTTTAAGATGC | 24-39 |
| M (SEQ ID NO: 7) | GAC (SEQ ID NO: 56) | |
| | GTCGCATCTTAAAAGGCGATGCGCTGCCATTGC | |
| | TAC (SEQ ID NO: 100) | |
| LAZR01002400_19\|P (SEQ ID NO: 8) | GTAGCAATGGCAGCGCATCGCCTTTTAAGATGC | 24-39 |
| | GAC (SEQ ID NO: 56) | |
| | GTCGCATCTTAAAAGGCGATGCGCTGCCATTGC | |
| | TAC (SEQ ID NO: 100) | |
| LAZR01002400_15\|M (SEQ ID NO: | GTAGCAATGGCAGCGCATCGCCTTTTAAGATGC | 24-39 |
| 9) | GAC (SEQ ID NO: 56) | |
| | GTCGCATCTTAAAAGGCGATGCGCTGCCATTGC | |
| | TAC (SEQ ID NO: 100) | |
| SDBU01080949_7\|P (SEQ ID NO: 10) | GTAGCAATGGCAGCGCATCGCCTTT (SEQ ID | 49 |
| | NO: 57) | |
| | AAAGGCGATGCGCTGCCATTGCTAC (SEQ ID | |
| | NO: 900) | |
| SDBU01080949_6\|M (SEQ ID NO: | GTAGCAATGGCAGCGCATCGCCTTT (SEQ ID | 49 |
| 11) | NO: 57) | |
| | AAAGGCGATGCGCTGCCATTGCTAC (SEQ ID | |
| | NO: 900) | |
| SDBV01087475_1\|P (SEQ ID NO: 12) | GTAGCAATGGCAGCGCATCGCCTTTTAAGATGC | 35-39 |
| | GAC (SEQ ID NO: 56) | |
| | GTCGCATCTTAAAAGGCGATGCGCTGCCATTGC | |
| | TAC (SEQ ID NO: 100) | |
| SDBV01087475_1\|M (SEQ ID NO: | GTAGCAATGGCAGCGCATCGCCTTTTAAGATGC | 35-39 |
| 13) | GAC (SEQ ID NO: 56) | |
| | GTCGCATCTTAAAAGGCGATGCGCTGCCATTGC | |
| | TAC (SEQ ID NO: 100) | |
| SRR2657585_2135055_9\|M (SEQ ID | GGATCAATGCTTGCTCGATGGCTT (SEQ ID | 30-49 |
| NO: 14) | NO: 58) | |
| | AAGCCATCGAGCAAGCATTGATCC (SEQ ID | |
| | NO: 901) | |
| SRR2657585_2135055_8\|P (SEQ ID | GGATCAATGCTTGCTCGATGGCTT (SEQ ID | 30-49 |
| NO: 15) | NO: 58) | |
| | AAGCCATCGAGCAAGCATTGATCC (SEQ ID | |
| | NO: 901) | |
| SRR2657585_1667169_1\|M (SEQ ID | CCAACAATGCTAGCGAGACGGCTTCATGATCTC | 35-38 |
| NO: 16) | GACG (SEQ ID NO: 59) | |
| | CGTCGAGATCATGAAGCCGTCTCGCTAGCATTG | |
| | TTGG (SEQ ID NO: 902) | |
| SRR8451930_3283449_6\|P (SEQ ID | GTAGCAATGGCAGCGCATCGCCTTTTAAGATGC | 37-51 |
| NO: 17) | GAC (SEQ ID NO: 56) | |
| | GTCGCATCTTAAAAGGCGATGCGCTGCCATTGC | |
| | TAC (SEQ ID NO: 100) | |
| SRR8451930_3283449_6\|M (SEQ ID | GTAGCAATGGCAGCGCATCGCCTTTTAAGATGC | 37-51 |
| NO: 18) | GAC (SEQ ID NO: 56) | |
| | GTCGCATCTTAAAAGGCGATGCGCTGCCATTGC | |
| | TAC (SEQ ID NO: 100) | |
| SRR8452060_665073_11\|P (SEQ ID | GTAGCAATGGCAGCGCATCGCCTTTCAAGATGC | 36-48 |
| NO: 19) | GAC (SEQ ID NO: 60) | |
| | GTCGCATCTTGAAAGGCGATGCGCTGCCATTGC | |
| | TAC (SEQ ID NO: 903) | |
| SRR8452060_665073_10\|M (SEQ ID | GTAGCAATGGCAGCGCATCGCCTTTCAAGATGC | 36-48 |
| NO: 20) | GAC (SEQ ID NO: 60) | |
| | GTCGCATCTTGAAAGGCGATGCGCTGCCATTGC | |
| | TAC (SEQ ID NO: 903) | |
| SRR6448207_2353026_47\|M (SEQ ID | GTCGCAATCTTTGCCGAGTCAAGCATGAACTCG | 36-37 |
| NO: 21) | GACC (SEQ ID NO: 61) | |
| | GGTCCGAGTTCATGCTTGACTCGGCAAAGATTG | |
| | CGAC (SEQ ID NO: 904) | |
| SRR7004342_2720286_9\|P (SEQ ID | GTATTCACGCTTGCGAGGACGGATTGCGTCCTC | 35-46 |
| NO: 22) | GAC (SEQ ID NO: 62) | |
| | GTCGAGGACGCAATCCGTCCTCGCAAGCGTGAA | |
| | TAC (SEQ ID NO: 905) | |
| SRR7004342_2720286_9\|M (SEQ ID | GTATTCACGCTTGCGAGGACGGATTGCGTCCTC | 35-46 |
| NO: 23) | GAC (SEQ ID NO: 62) | |
| | GTCGAGGACGCAATCCGTCCTCGCAAGCGTGAA | |
| | TAC (SEQ ID NO: 905) | |
| SRR6491179_278020_2\|M (SEQ ID | GTACAACGAACTGAAAGTGCGCCGAACAGGTGC | 34-41 |
| NO: 24) | AAC (SEQ ID NO: 63) | |
| | GTTGCACCTGTTCGGCGCACTTTCAGTTCGTTG | |
| | TAC (SEQ ID NO: 906) | |
| 3300028800\|Ga0265338_10000470_3 | GGCACGATCGATGCGAGACCTCGCGGTGGTCTC | 35-54 |
| 8\|P (SEQ ID NO: 25) | GAC (SEQ ID NO: 64) | |
| | GTCGAGACCACCGCGAGGTCTCGCATCGATCGT | |
| | GCC (SEQ ID NO: 907) | |
| 3300031235\|Ga0265330_10003750_4l | GGCACGATCGATGCGAGACCTCGCGGTGGTCTC | 36-50 |
| P (SEQ ID NO: 26) | GAC (SEQ ID NO: 64) | |
| | GTCGAGACCACCGCGAGGTCTCGCATCGATCGT | |
| | GCC (SEQ ID NO: 907) | |
| 3300031241 \|Ga0265325_10000012_1 | GGCACGATCGATGCGAGACCTCGCGGTGGTCTC | 35-54 |
| 20\|M (SEQ ID NO: 27) | GAC (SEQ ID NO: 64) | |
| | GTCGAGACCACCGCGAGGTCTCGCATCGATCGT | |
| | GCC (SEQ ID NO: 907) | |
| 3300031242\|Ga0265329_10001065_51 | GGCACGATCGATGCGAGACCTCGCGGTGGTCTC | 35-50 |
| P (SEQ ID NO: 28) | GAC (SEQ ID NO: 64) | |
| | GTCGAGACCACCGCGAGGTCTCGCATCGATCGT | |
| | GCC (SEQ ID NO: 907) | |
| 3300031247\|Ga0265340_10001032_1 | GGCACGATCGATGCGAGACCTCGCGGTGGTCTC | 36-49 |
| 8\|P (SEQ ID NO: 29) | GAC (SEQ ID NO: 64) | |
| | GTCGAGACCACCGCGAGGTCTCGCATCGATCGT | |
| | GCC (SEQ ID NO: 907) | |
| 3300031250\|Ga0265331_10001842_6\| | GGCACGATCGATGCGAGACCTCGCGGTGGTCTC | 36-49 |
| P (SEQ ID NO: 30) | GAC (SEQ ID NO: 64) | |
| | GTCGAGACCACCGCGAGGTCTCGCATCGATCGT | |
| | GCC (SEQ ID NO: 907) | |
| 3300031344\|Ga0265316_10000001_5 | GGCACGATCGATGCGAGACCTCGCGGTGGTCTC | 35-54 |
| 57\|P (SEQ ID NO: 31) | GAC (SEQ ID NO: 64) | |
| | GTCGAGACCACCGCGAGGTCTCGCATCGATCGT | |
| | GCC (SEQ ID NO: 907) | |
| 3300031733\|Ga0316577_10033675_3\| | CCCGGAATGCTAGCTCGATGGCTATTCAATCGA | 19-38 |
| M (SEQ ID NO: 32) | GAC (SEQ ID NO: 65) | |
| | GTCTCGATTGAATAGCCATCGAGCTAGCATTCC | |
| | GGG (SEQ ID NO: 908) | |
| SRR8543844_2229942_334\|P (SEQ | GGCACGATCGATGCGAGACCTCGCGGTGGTCTC | 35-54 |
| ID NO: 33) | GAC (SEQ ID NO: 64) | |
| | GTCGAGACCACCGCGAGGTCTCGCATCGATCGT | |
| | GCC (SEQ ID NO: 907) | |
| SRR8543847_1991039_375\|P (SEQ | GGCACGATCGATGCGAGACCTCGCGGTGGTCTC | 35-54 |
| ID NO: 34) | GAC (SEQ ID NO: 64) | |
| | GTCGAGACCACCGCGAGGTCTCGCATCGATCGT | |
| | GCC (SEQ ID NO: 907) | |
| SRR8543989_2137428_34\|M (SEQ ID | GGCACGATCGATGCGAGACCTCGCGGTGGTCTC | 35-54 |
| NO: 35) | GAC (SEQ ID NO: 64) | |
| | GTCGAGACCACCGCGAGGTCTCGCATCGATCGT | |
| | GCC (SEQ ID NO: 907) | |
| SRR8543995_2079833_6\|M (SEQ ID | GGCACGATCGATGCGAGACCTCGCGGTGGTCTC | 35-54 |
| NO: 36) | GAC (SEQ ID NO: 64) | |
| | GTCGAGACCACCGCGAGGTCTCGCATCGATCGT | |
| | GCC (SEQ ID NO: 907) | |
| SRR8544146_618080_5\|P (SEQ ID | GGCACGATCGATGCGAGACCTCGCGGTGGTCTC | 34-48 |
| NO: 37) | GAC (SEQ ID NO: 64) | |
| | GTCGAGACCACCGCGAGGTCTCGCATCGATCGT | |
| | GCC (SEQ ID NO: 907) | |
| SRR6963591_1323413_2\|M (SEQ ID | TAAAACACCTGCGAGATGGTTTATGAATCTCGA | 38-43 |
| NO: 38) | C (SEQ ID NO: 66) | |
| | GTCGAGATTCATAAACCATCTCGCAGGTGTTTT | |
| | A (SEQ ID NO: 909) | |
| SRR7976138_3273187_71\|P (SEQ ID | GGATCAACCTCTGCGGGAACGAGCGTGGTTCCC | 24-45 |
| NO: 39) | GAC (SEQ ID NO: 67) | |
| | GTCGGGAACCACGCTCGTTCCCGCAGAGGTTGA | |
| | TCC (SEQ ID NO: 910) | |
| SRR7976138_3273187_70\|M (SEQ ID | GGATCAACCTCTGCGGGAACGAGCGTGGTTCCC | 24-45 |
| NO: 40) | GAC (SEQ ID NO: 67) | |
| | GTCGGGAACCACGCTCGTTCCCGCAGAGGTTGA | |
| | TCC (SEQ ID NO: 910) | |
| 3300012943\|Ga0164241_10000441_4 | GGATCAACCTCTGCGGGAACGAGCGTGGTTCCC | 24-45 |
| 0\|P (SEQ ID NO: 41) | GAC (SEQ ID NO: 67) | |
| | GTCGGGAACCACGCTCGTTCCCGCAGAGGTTGA | |
| | TCC (SEQ ID NO: 910) | |
| 3300012943 \|Ga0164241_10000441_3 | GGATCAACCTCTGCGGGAACGAGCGTGGTTCCC | 24-45 |
| 9\|M (SEQ ID NO: 42) | GAC (SEQ ID NO: 67) | |
| | GTCGGGAACCACGCTCGTTCCCGCAGAGGTTGA | |
| | TCC (SEQ ID NO: 910) | |
| 3300031949\|Ga0214473_10000008_3 | GTAGCAATCGATGCGAGACCTCGCACTGGTCTC | 35-44 |
| 52\|M (SEQ ID NO: 43) | GAC (SEQ ID NO: 68) | |
| | GTCGAGACCAGTGCGAGGTCTCGCATCGATTGC | |
| | TAC (SEQ ID NO: 911) | |
| 3300031965\|Ga0326597_10001868_1 | ATGACAATGCCAGCCCAGCGGCCTGAAAGCTGG | 35-38 |
| 2\|M (SEQ ID NO: 44) | GAC (SEQ ID NO: 69) | |
| | GTCCCAGCTTTCAGGCCGCTGGGCTGGCATTGT | |
| | CAT (SEQ ID NO: 912) | |
| 3300006795\|Ga0075520_1037237_1\| | TACGGCACCACAGTGCATCGAATAGATGCAAC | 31-39 |
| M (SEQ ID NO: 45) | (SEQ ID NO: 70) | |
| | GTTGCATCTATTCGATGCACTGTGGTGCCGTA | |
| | (SEQ ID NO: 913) | |
| 3300014491 \|Ga0182014_10039677_1\| | GTACAACGAACTGAAAGTGCGCCGAACAGGTGC | 34-41 |
| P (SEQ ID NO: 46) | AAC (SEQ ID NO: 63) | |
| | GTTGCACCTGTTCGGCGCACTTTCAGTTCGTTG | |
| | TAC (SEQ ID NO: 906) | |
| 3300014491 \|Ga0182014_10071250_1\| | GTGTACGGCACCAGAGTGCATCGAATAGATG | 40-45 |
| M (SEQ ID NO: 47) | (SEQ ID NO: 71) | |
| | CATCTATTCGATGCACTCTGGTGCCGTACAC | |
| | (SEQ ID NO: 914) | |
| 3300017975\|Ga0187782_10004712_9\| | GTGTTCACGCTTGCGAGGACGGATTGCGTCCTC | 35-44 |
| P (SEQ ID NO: 48) | GAC (SEQ ID NO: 72) | |
| | GTCGAGGACGCAATCCGTCCTCGCAAGCGTGAA | |
| | CAC (SEQ ID NO: 915) | |
| 3300017975\|Ga0187782_10004712_9\| | GTGTTCACGCTTGCGAGGACGGATTGCGTCCTC | 35-44 |
| M (SEQ ID NO: 49) | GAC (SEQ ID NO: 72) | |
| | GTCGAGGACGCAATCCGTCCTCGCAAGCGTGAA | |
| | CAC (SEQ ID NO: 915) | |
| SRR7027835_762984_1\|M (SEQ ID | GTAACAGTGGCATCACAGTGCATTGAATAGATG | 34-46 |
| NO: 50) | CAAC (SEQ ID NO: 55) | |
| | GTTGCATCTATTCAATGCACTGTGATGCCACTG | |
| | TTAC (SEQ ID NO: 99) | |

TABLE 5
Non-coding Sequences of Representative CLUST. 133120 Systems

>3300017975|Ga0187782_10004712_9|M
TCTAATATTCTCTATGCCGAAGCCGGTTCGCGATGGATCAACCGTTGGGAGAGTGGCCAACTTGAAGCTGAGATGAAGCGTGCAAT
CGGGAAAATGTACCAGCGTATGCGTCTCGCGGAGAAAGTCATTGCACCCAAAAGAAGGCGTTAAGTAAATTGTGAGTGATCTACCG
CCCTGCCGCGTTCAAAGCATTCGCGCAAGCATGAACGCGCTGTACTGGACGCTGATCGTGGCAATCCTGGTTGGGATAGCGGCCGT
CAGCTTCACGCTTGGCGTCAAGCGTATGTACAATTGGGCGCACGCTCCGCATGCTCCGTCCGTTGTGGATTGCGGACGAGATTACG
ACGACGTGCGATGCCAGCTTTTGTACCTAGAGGACGTTTACTTGTGCGTGCTGAAAGACACTAGGCACGAGCCTTCGGAAGGCTCC
GGTCAAATACAAACGCTACTGATGCACGTCAGAAGATCGGCACAGAGGTAGGCGCGTTGGCGCCTTGCTCTTGACAAGTGCGCGAT
AACAACGTACTCTCGACAAGCGAATAAGTGGCAGCAGACGGGCGTTATAGACCCGAAAGGAAAACCACGTGGCTACCAAAGTCTTG
AAGTTCTATTGCGTACCCGCCTCTGCCCGAGATAACCAGCTCCTCTGCGAACAAGTGAAGCTCGGCTCGATGTACAGACGCGATCT
CGCTTGGATCGAGAATCGCGCACGCGAGCTGCGCCGTGCCATTGCCGATTGGCCTGCGCGTGATGTACCCATCGAAAAGCGTTCAG
AGTGGTGGAAGTCTGATGTCGGTCGCGCGGCCTCCAAAGCATGGCACGACCAGGATCGTACAGCTGCACGCAATCTCCTCGCCGGT
GCGAGCGCCATCGCGCGCGGTGAGAACGGGTGGCCGCTCGAAGCAAAGGTTTCGAAGGCTTCCAAGAAAAAGGTGGTGCTACGCCG
CACGCGTAAGCGCATTGTGGTGTGACCGCTCGCAAGAGCGGTGTGAAGTAACTGGTTTTGCTATTGATCTCTGACAACCTCGACAA
AGCGCCTGACTAGCCGTGACTTCCTATTTGCCTAGGGCTCTACACGAGCGGATTACGCTCGTAAACGAGGTTTTGATGCTTGCACG
GGCGGATTGCGCTCGTGACCTCACGCTCCTCGGTCACTTATTTCCGTTGCATCGCACTGCCCGCAATCAGCACGAGCCCTAGCCCG
ATCACACCCAACGCGACCACGACGATCAAGCCTTCAATCCCAACGTTCGCGTAGCGCGGCGATCGTCAGTTCCAACGGGTACTGAT
CGAATCCGTGCCAGCCGTAGTGGCCAGCGGCATCCCAAACGGCGTTTGCACGCTCACTCGCAGTCTTCAAGTTCTTTGCGTCATAC
CGTTCTAGGTC (SEQ ID NO: 73)
>3300006795|Ga0075520_1037237_1|M
TCTCACACCCCGGAGTCCCAACCGACCCCGAGATTCCCGAATGGCTCAAGGCGTCGATTGCGCGACAGAGATCCCTCTGGAATCGG
TTGGCATACTTCTGTCGCGAAGCAAGACGGAAGTGCTCGCCAGCGCCCACGGCTGAAATAGTGGCGTTTGTTCGAGGGACCATTCT
TCCGGAGATCGATGCGTTCAATGACGCTCTCGGGCGGTCGAAGGCAAAGATCAAGCATCCTGCCAAGCTCAAGACGGAGATGCCGG
GGATCGATGGACTGTGGCACTTCGTTGGGCAGCTCCGGTGCAACCACCTTAACCCTGGCACCGGGAAAGAGTACTTCACCTGCGAG
AAATGCGAGCGGCAGATCAAACAAGACCACAATGCCGCGGTCAATATCTCGCGCTTCGGCTGTGATCCAGAACTGGCAGAGATGGC
CGCCTCTGCTGGCTGAGTCTTTACCTATAGCTCTGCTCGAATCTCAAGCGAGCATTTATTGCTCGGGAGGTTCGCGCAGGTTGTTC
CCGCACATAATAAAGGAGATTGTGAAATATCAAGGGCGATGTCGTCAAATCAAATACTCTGCGGGGAGGGTTCGCGCAAACCATTC
CGTAGATCATTGCGGTCGAATAAGTTACAGTGAAGGAATCCATGCGATTGAAAACTATTGTAGTCGCGCTGGTGCTGCGTAC
(SEQ ID NO: 74)
>3300017971|Ga0180438_10084474_2|M
CCACAACAAGGTGTTCAAGCAGCTCGCCGAAGAACTCGGGCTCGCCGTCGAGAAACAGGGTGCCCGGGGGTTGGCGGCCACCTCCG
TGCCCGCGGAAACCGCGAAGCGCTGGCAGAAGACCATCAAAGAACTCGACAAGGCCATCAAGACGTTTCGGTTCGCCGAGGGCCCC
AGGGGCGGCAGCAAAGGTGAGAACCGCCAGCTGCTGGCCATCTGCCAGTGCCGCCGCAAGATCCGGTTGTCCCGGGAGGCCTACGA
CGCTGGCCCCATCATCTGCCGGGTATGTGAACGACACTTCGAGATAAAGGAGTAGAAAAATGAAAGTATTCAAGTACGGTGCTCGA
CCCGTAAACCAGGAGAGCCTCATTCGTGATCAAATGAAGCTCGCCCGAAACTACTACAACAAGCTCGTTGAAACGGAGAACAAGAG
ACGGCAACAGGCCTGGGGCAGCGAAAAGCCTCCTCCTGCGACCATGAAGAGGTAACACCTACGAGACGGTTTATGAGTTTCGACTA
TACTACTGATAATCTGCCCCAACTTGTCTCATGGATAAAACACCAGCGAGATGGTTTATAAATCTCGACAGACTCGCGGATGGAAG
AGAACTCGCGACACTCGCGGGGTAGAACACCAGCGAGATGGTTTATGAATCTCGACAGGTCGAAGTAGATACCAAACCTCTACCAT
AACCTTACGTAATTCTTGACTTTTATTTGCACTTGCGTAAGTGAATACCCGAACAGTACAATCGTCTACATACCAGCGGCTTAGAG
GAGCCAGAAAGGAGAACTAGATGTCAGCAGCCTTATTAGCCCCGCTTTGGAGGAAGCCGTACATCCTCGGGGGCAACGCCAAGGTC
ACCTTGGTGTCTACCAAGTCCGAGTGCCGGTTCACATTCCGCATCCGCGCCAAGGAAGTCGAGAAAGATCGCGTTCTCCACTTCGT
CAGCGTGCTGACGGGGCCTGAGAACACGACCGACTACTCCTTCCTGGGAACCATCTTCGACGGCGACAAGTTCGTTCACGGTAAGA
AGTCGAAGATCACGGCCGACGCGCCCAGCGCGAAGGCCTTCTCCTGGCT (SEQ ID NO: 75)
>SRR8543844_2229942_334|P
CAAGTCACTCATCGTGATCTTTCTGCGCTTCATCTCGGCGCGGAGCCACGACTCTTCGGTGTCGGTGACGCGCGCACCGATGTAGT
GGCTGAGTTTCTCCGCGGCTTGTTGCTTCGGCTCGAACATTGCGTCTTGCAAAACGTCTATCATCCTGTTAGCTGTTCGTCAATGC
AACAACAGCACGTGCGACAGCGGGGCGCCCAACAATGACGATGCGCGTGTACAAGTTCCTCTGTCTCCCGGCGACGGCCGCCGACG
ACCATTGCTTGCGCGAGCAGGTGCGCCTCGGCGCGCGCTACCGCCGACAGATCGCGCTCATCGAGAACCGCGAGCGCTTCCTCCGG
CGCGCGCTCATCCTCGCCGCCGCGAGCGCCGTCGCGCGCGGCGAGAGCGGGTGGCCGCTCGACCCCAAGGTTCCGGCACCTTCGAC
GAAGAAGAAGGCCCCGGCGCGGCGGAACCGGCGGAAGGACCAGCAGCCGCTCGCGCCGAGCCCCGCAACGCCGTAGGATCGTTCGT
TCCATGCTTATCCGGTTAACACCCCAAACGTGATCAGGGAGACATCAAATGGCATCGCGACTCGAACGTGAACTTAAAATCATCCG
CTCCGAAATGGGCGAGCTTCTTTCCGCCTCTCTGGGCAAGCGACCGTCCGTGATCAACGTCGGCGGAACGATTCAAGAACTCACCC
CAACGGAAGCTCTCGCTGAATGGCGAGCCTCTGCGAAGCGCGCCGAGCGAAAGATCAAGGAGATCCGTCGCGCCCGCGAGGGGTGA
CAACCGGATAAGCATGGTTCGTTCTCTGACAATCGAAACCTACGGATTGTCCTCGGCGGAGGGATTCGGGTTCGTCGGCACGATCG
CGGGCGCGCTATGGTGAGGTCATGGC (SEQ ID NO: 76)
>3300020171|Ga0180732_1000630_46|P
CGCATGCGCCTGATGCAGATCGAGTGGGAGAAGCAGCCGAAGTTCACGCTCGGCGCCTGCCGGCCGCCCGGGGTGCCGCACACCTG
GCCGCCCAAGTCGGCCGGGCCGGCCTGGATGGTCGTGTTTCGGGTGAAGGGGACGAGCAAATGATGAAAGTATTCAGTTTTGGTGC
TAGGGCTCGGTCACTTGACGCCGAGGTCCGCGAGCAAATGCGCCTCGGTCGAGAGTGCTATAACGCGCTGGTCGAAGTGGAAAACG
CTCGCCGTCACTTGGCCTGGGGTGGGGACATCCCCCCAAAGCCACCGCATCCGCTACCACTGACCCAGGATGGCGACGAGAACGAC
GATGAGACTGCGTGGCTAGATCGCGACCTCGTAAGCACTCGTAACATGCTGGTTGCCTACGCTGCGGAGGAGAGGCGGCGACCAAC
CGCTCGCAAAACCGCTGCTAGATTCGGGAAACGACACAAGACCTCGACGAGCCTCGACAATGCCAGCCCAGCGGCCTAGAAGTTGG
GACAAGTTGGCTCCGACTGACAATGCCCACGAAGTCGGGCCTCGACAATGCCAGCCCAGCGGCCTAGAAGTTGGGACGCCGCCCCT
GTCCTGCGGCTCCTCGTCCGTCGCCGTTCGACAATGCCAGCCCAACGGCCTAGAAGTTGGGACAACCCGTCCATGTAGTCGCGGGC
CGCTTCGCTGACTGATGATGCCAGCCCAACGGCCTAGAAGTTGGGACATGTTTAGACGCGCCACCCAGCCCGCTCCCGATGCGGCT
GATGATGCCAGCCCAACGGCCTAGAAGTTGGGACGACGATGTACCAAGAGTGCCTGATGATGCCAGCCCAACGGCCTAGAAGTTGG
GACCGGGTGCCTCGGCCCACAGCTTCGCCGGCAACGCGGTCGACAATGCCAGCCCAACGGCCTAGAAGTTGGGACCATGGCCAGGA
TGCTGATGATGCCAGCCCAACGGCCTAGAAGTTGGGACAGAAGGCCACCGTCGTCGGTGGGCAGGTCGACCCGGCACCTGATGATG
CCAGCCCAGCGGCCTAGAAGCTGGGACTGCGATCCGTCGTGGTCCGCCATCGAGATCGATGCCGATCTGATGATGCCAGTCCAGCG
GCCTAGAAGCTGGGACCTGTCAGCACTGTGGCCTGACCCATCCGTGCCTAGCTATCGACAATGCCAGCCCAGCGGCCTAGAAGCTG
GGACTACCACGGTGGGCACCGTGCTATTCATTGGCTACCCAATGAATATGGTGTATAGCATTATAGTCTTAGAAAAAAATCTTAGT
AAAACGCGGCGCAAAGGACGGTGACTAGTGGACGACCCCAGACTGGAAGTAGCGGCCCAGGCAATCGACAGGCCGGAGGCCCAGGT
CAAGGAGCTGTCGGACGCGCTGCCCGACGCCAAATACTTGAGCAATCTCGCGGCGCGGCTGAAGGACGTTCCCAAGACGTATGGCG
TGTTC (SEQ ID NO: 77)
>3300027740|Ga0214474_1000103_17|M
AATGGAATAGCCCGGACGGTACTTGACACGTGTAGAAAATGCTACTATTTATGTAGTAATCATTATGCCAACCCCATTTTTCCAGC
CAGGCGATCCGCGTTGCCACCGCGCCGGCAGACCCAAGGGGACAGCGCTCAAGAAAATGCGCAAGATGGCTGCCGAGGTGCTAGGC
GAGGAGCTGGAAACGCCGACTGGGCGTATGACCCGCGCAAAA (SEQ ID NO: 78)
>SRR7976138_3273187_70|M
CCCGTGGTCCTGACGTTGTTCGGGGGATATCGGGATGACCATCCCGAGAGCGTGCTGGGGCTCCACGCGATGGGCGTGGCCCGCGC
GCTCTACTGGCTCGCGGGCGTCCGCAAGCTCGCCGACTGGCGCGCGGATGTTCGCCCGCGCTGAGTCTCTGCGGAGGCGAGTTTGG
CCTCCGACACCGAGTCCGCACGTTATCACCGGGTTGGCGGTCGCCGACCCAGAAGGGATCGAGATCATGATGTGCTTCCAATACTG
GGCCGAGCCCGTCGACGAGACGAGCAAGGCACTCCTCGCTCACCAACTCCGCGAGGGCGCGATGTACCGCCGCATCCTCGCCACGC
TCGAAAATCGCGATCAAGACCACAGCGCCGCGAGGACTCTGCTCGCGAGCGGTCTGGTGATGGCGCTCGAAGGCGCAGCGACGAAG
GGTCGAACCCCGCGAAAGATGGGGGCGCGGCGTACGCGCAAGAAGGCCCAGGTCGAGATCGCTCGCGACGCGTGATACAAGTTCGC
TCTCTGACAACCGAATAGGTCATCGCA (SEQ ID NO: 79)
>3300014491|Ga0182014_10071250_1|M
TCCCTCTGGAATCGGTTGGCATACTTCTGTCGCGAAGCAAGACGGAAGTGCTCACCAGCGCCCACGGCTGAAATAGTGGCGTTTGT
TCGGGAGATCATTCTTCCGGAGATCGATGCGTTCAATGACGCTCTCGGGCGGTCGAAGGCAAAGATCAAGCATCCTGCCAGGCTTA
AGACGGAGATGCCGGGGCCCGATGGACTGTGGAACTTCGTTGGGCAGCTCCGGTGCAACCACCTTAACCCTGGTACTGAGAAAGAG
CACTTCACCTGCGAGAAATGCGAGCGGCAGATCAAACAAGACCACAATGCCGCGGTCAATATCTCGCGCTTCGGCTGTGATCCAGA
ACTGGCAGAGATGGCCGCCTCTGCTGGCTGAGTCTTTACCTATGCCCTGTGCGGATCTCAAGCGAGCATTTATTGCTTGGGAGGTT
CGCGCAGGCTATTTCCGCTCATAACAAAGGAGATTGTGAAATATCAAGGGCGATGTCGTCAAATCAAATACTCTGCGGGGAGGGTT
CCCGCTAACCATTCCGTAGATCATTGCGGTCCAATAAGTTACAGTGAAGGAGTTGGATTTTCACGCTGCCGCTTGGAAATTGAGTT
TGTAGCGGTATCCGCGCCCAATATTTTGCGCAGAATCAGACTCAGGCTAAAAGTCTTCTCCCGTGAGAGGCACG (SEQ ID NO:
80)
>SRR2657585_2135055_9|M
TCTCATGTACGCCACCGTCGATCCTCGGGCGAACGGAGGGTTTATGGTGACCTACGGTTGGCGAAACAAAGATGGAACCGCGGAGG
TGATGCGAGAGCACTTCTCTGACCTCGAAGATGCCAAGGTTGATGCGGCAGACTTTATGCTCTGCCGCGGGGACTGGGAAGAATGA
GCAGGGCCAAATGCCCAAAAAAGCGCTTGTTGGCTCACGCCCGAGGCGAAGACGAGTGCTGGCTATGGCCAGGAGCGGACTCTGGC
AACGGCTACGGGAGGATCTCAGTGGACGGCAAAACAAGAGCGACTCACATCGTGGCCTACGAGCTGTTTACCGGTACTCGTGTGCC
GCCTGGAATGGTGCTCGACCATCAGTGTCGAAATCGACTGTGCTACAACCCGAGATGCCTCAAGCCCATTCCAGGCATTGTCAACA
CGCTCATCGGTGAGGGACCTACTGCAGCCAATGCGCTCAAGACGCATTGCTGTCGCGGCCACGAGTTGGCCGGTGAGAATCTCATC
ACTAGGACTCGCGAAGGTCGGCGGCCAAGTCGTGAGTGTCGTGCCTGCCGCAGGATGCGCGGCAGAGCGCAGGAGATGTGCGTATG
AGCAAGTGCGAGGGCTGCGGGGAAGATCATCTCGTCCTAGGCGCTTGCATACTGAAGGCAGCGATCTACGAGGCTCCCTGTATCTA
CTGTCATGCGCGGCCAGGAGAACTGTGCGTAACCTGCACCGGCAAGGAGAGCCCGCAGTGGCACATGCAGCGCGTCGGGGCTGGCC
ACACGCTACTAGTCGCGAGAGGAACACCGTGCCTTGCTTCTCGCCATATACAGAGAATGCGCGGAAACCGTCGCAATAAAGGGCAC
ACCAGACAGAACTGGCATCGCAACAAGGAACGACTGAGTCATGGAAAGAGAGTGAAATAATATGGCTACACGCGTCTACAAATTCG
GAGCCCGCTCACCAGGTGAGGCCACTCTTCTGCGCGCCCAGATGAAACTGGGCCGCGAGTACTACAACGCCCTCGTCGAGGTCGAG
AATAAGCGCCGGCAAAAAGCCTGGGGCGCCGAGACGGTGCCAGCACCACCGCACGAGGATTGCAAGTTGCCCAAGTGCCCCGAGTG
TCGCGACCATTGGCGAGCG (SEQ ID NO: 81)

### Example 2—Functional Validation of Two Engineered CLUST.133120 CRISPR-Cas Systems

[0390] Having identified components of CLUST.133120 CRISPR-Cas systems, two loci were selected for functional validation: 1) a locus from the metagenomic source designated 3300027740 (SEQ ID NO: 1) and 2) a locus from the metagenomic source designated 3300017971 (SEQ ID NO: 2).

### DNA Synthesis and Effector Library Cloning

[0391] To test the activity of the exemplary CLUST.133120 CRISPR-Cas systems, systems were designed and synthesized using a pET28a(+) vector. Briefly, an E. coli codon-optimized nucleic acid sequence encoding the CLUST.133120 3300027740 effector (SEQ ID NO: 1 shown in TABLE 3) and an E. coli codon-optimized nucleic acid sequence encoding CLUST.133120 3300017971 effector (SEQ ID NO: 2 shown in TABLE 3) were synthesized (Genscript) and individually cloned into a custom expression system derived from pET-28a(+) (EMD-Millipore). The vectors included the nucleic acid encoding CLUST.133120 effectors under the control of a lac promoter and an E. coli ribosome binding sequence. The vector also included an acceptor site for a CRISPR array library driven by a J23119 promoter following the open reading frame for the CLUST.133120 3300027740 effector. The non-coding sequence used for the CLUST.133120 3300027740 effector (SEQ ID NO: 1) is set forth in SEQ ID NO: 78, and the non-coding sequence used for the CLUST.133120 3300017971 effector (SEQ ID NO: 2) is set forth in SEQ ID NO: 75, shown in TABLE 5. Additional conditions were tested, wherein the CLUST.133120 3300027740 effector (SEQ ID NO: 1) and the CLUST.133120 3300017971 effector (SEQ ID NO: 2) were individually cloned into pET28a(+) without the non-coding sequence. See FIG. 1A.

[0392] An oligonucleotide library synthesis (OLS) pool containing “repeat-spacer-repeat” sequences was computationally designed, where “repeat” represents the consensus direct repeat sequence found in the CRISPR array associated with the effector, and “spacer” represents sequences tiling the pACYC184 plasmid or E. coli essential genes. In particular, the repeat sequence used for the CLUST.133120 3300027740 effector (SEQ ID NO: 1) is set forth in SEQ ID NO: 51, and the repeat sequence used for the CLUST.133120 3300017971 effector (SEQ ID NO: 2) is set forth in SEQ ID NO: 52, as shown in TABLE 4. The spacer length was determined by the mode of the spacer lengths found in the endogenous CRISPR array. The repeat-spacer-repeat sequence was appended with restriction sites enabling the bi-directional cloning of the fragment into the aforementioned CRISPR array library acceptor site, as well as unique PCR priming sites to enable specific amplification of a specific repeat-spacer-repeat library from a larger pool.

[0393] Next, the repeat-spacer-repeat library was cloned into the plasmid using the Golden Gate assembly method. Briefly, each repeat-spacer-repeat was first amplified from the OLS pool (Agilent Genomics) using unique PCR primers and pre-linearized the plasmid backbone using BsaI to reduce potential background. Both DNA fragments were purified with Ampure XP (Beckman Coulter) prior to addition to Golden Gate Assembly Master Mix (New England Biolabs) and incubated per the manufacturer's instructions. The Golden Gate reaction was further purified and concentrated to enable maximum transformation efficiency in the subsequent steps of the bacterial screen.

[0394] The plasmid library containing the distinct repeat-spacer-repeat elements and CRISPR effectors was electroporated into E. Cloni electrocompetent E. coli (Lucigen) using a Gene Pulser Xcell® (Bio-rad) following the protocol recommended by Lucigen. The library was either co-transformed with purified pACYC184 plasmid or directly transformed into pACYC184-containing E. Cloni electrocompetent E. coli (Lucigen), plated onto agar containing chloramphenicol (Fisher), tetracycline (Alfa Aesar), and kanamycin (Alfa Aesar) in BioAssay® dishes (Thermo Fisher), and incubated for 10-12 hours at 37° C. After estimation of approximate colony count to ensure sufficient library representation on the bacterial plate, the bacteria were harvested, and plasmid DNA WAS extracted using a QIAprep Spin Miniprep® Kit (Qiagen) to create an “output library.” By performing a PCR using custom primers containing barcodes and sites compatible with Illumina sequencing chemistry, a barcoded next generation sequencing library was generated from both the pre-transformation “input library” and the post-harvest “output library,” which were then pooled and loaded onto a Nextseq 550 (Illumina) to evaluate the effectors. At least two independent biological replicates were performed for each screen to ensure consistency. See FIG. 1B.

### Bacterial Screen Sequencing Analysis

[0395] Next generation sequencing data for screen input and output libraries were demultiplexed using Illumina bcl2fastq. Reads in resulting fastq files for each sample contained the CRISPR array elements for the screening plasmid library. The direct repeat sequence of the CRISPR array was used to determine the array orientation, and the spacer sequence was mapped to the source (pACYC184 or E. Cloni) or negative control sequence (GFP) to determine the corresponding target. For each sample, the total number of reads for each unique array element (rₐ) in a given plasmid library was counted and normalized as follows: (rₐ+1)/total reads for all library array elements. The depletion score was calculated by dividing normalized output reads for a given array element by normalized input reads.

[0396] To identify specific parameters resulting in enzymatic activity and bacterial cell death, next generation sequencing (NGS) was used to quantify and compare the representation of individual CRISPR arrays (i.e., repeat-spacer-repeat) in the PCR product of the input and output plasmid libraries. The array depletion ratio was defined as the normalized output read count divided by the normalized input read count. An array was considered to be “strongly depleted” if the depletion ratio was less than 0.3 (more than 3-fold depletion), depicted by the dashed line in FIG. 3, FIG. 6, FIG. 9, and FIG. 12. When calculating the array depletion ratio across biological replicates, the maximum depletion ratio value for a given CRISPR array was taken across all experiments (i.e. a strongly depleted array must be strongly depleted in all biological replicates). A matrix including array depletion ratios and the following features were generated for each spacer target: target strand, transcript targeting, ORI targeting, target sequence motifs, flanking sequence motifs, and target secondary structure. The degree to which different features in this matrix explained target depletion for CLUST.133120 systems was investigated.

[0397] FIG. 3 and FIG. 6 show the degree of interference activity of the engineered compositions by plotting for a given target the normalized ratio of sequencing reads in the screen output versus the screen input. The results are plotted for each DR transcriptional orientation. In the functional screen for each composition, an active effector complexed with an active RNA guide will interfere with the ability of the pACYC184 to confer E. coli resistance to chloramphenicol and tetracycline, resulting in cell death and depletion of the spacer element within the pool. Comparison of the results of deep sequencing the initial DNA library (screen input) versus the surviving transformed E. coli (screen output) suggests specific target sequences and DR transcriptional orientations that enable an active, programmable CRISPR system. The screen also indicates that the effector complex is only active with one orientation of the DR. As such, the screen indicated that the CLUST.133120 3300027740 effector was active in the forward (5′-CCAA . . . CGAC-[spacer]-3′) orientation of the DR (FIG. 3) and that the CLUST.133120 3300017971 effector was active in the reverse (5′-GGTA . . . CGAC-[spacer]-3′) orientation of the DR (FIG. 6).

[0398] FIG. 4A and FIG. 4B depict the location of strongly depleted targets for the CLUST.133120 3300027740 effector (plus non-coding sequence) targeting pACYC184 and E. coli E. Cloni essential genes, respectively. Likewise, FIG. 7A and FIG. 7B show the location of strongly depleted targets for the CLUST.133120 3300017971 effector targeting pACYC184 and E. coli E. Cloni essential genes, respectively. Flanking sequences of depleted targets were analyzed to determine the PAM for CLUST.133120 3300027740 and CLUST.133120 3300017971. WebLogo representations (Crooks et al., Genome Research 14: 1188-90, 2004) of the PAM sequences for CLUST.133120 3300027740 and CLUST.133120 3300017971 are shown in FIG. 5 and FIG. 8, respectively. The “20” position corresponds to the nucleotide adjacent to the 5′ location of the target.

[0399] Furthermore, FIG. 9 shows that the CLUST.133120 3300027740 effector retains activity in the absence of the non-coding sequence. In agreement with FIG. 3, the CLUST.133120 3300027740 effector was active in the forward (5′-CCAA . . . CGAC-[spacer]-3′) orientation of the DR. FIG. 10A and FIG. 10B depict the locations of the strongly depleted targets for CLUST.133120 3300027740 effector (minus the non-coding sequence) targeting pACYC184 and E. coli E. Cloni essential genes, respectively. A WebLogo of the PAM sequences for CLUST.133120 3300027740 (minus the non-coding sequence) is shown in FIG. 11. Likewise, FIG. 12 shows that the CLUST.133120 3300017971 effector retains activity in the absence of the non-coding sequence. In agreement with FIG. 6, the CLUST.133120 3300017971 effector was active in the reverse (5′-GGTA . . . CGAC-[spacer]-3′) orientation of the DR. FIG. 13A and FIG. 13B depict the locations of the strongly depleted targets for CLUST.133120 3300017971 effector (minus the non-coding sequence) targeting pACYC184 and E. coli E. Cloni essential genes, respectively. A WebLogo of the PAM sequences for CLUST.133120 3300017971 (minus the non-coding sequence) is shown in FIG. 14. The “20” position corresponds to the nucleotide adjacent to the 5′ location of the target.

[0400] As such, multiple effectors of CLUST.133120 CRISPR-Cas show activity in vivo, both in the presence or absence of non-coding sequences. These results suggest that effectors of CLUST.133120 do not require a tracrRNA. CLUST.133120 effectors may thus be self-processing, allowing for ease in multiplexing.

### Example 3—Targeting of GFP by a CLUST.133120 Effector

[0401] This Example describes use of a fluorescence depletion assay (FDA) to measure activity of a CLUST.133120 effector.

[0402] In this assay, an active CRISPR system designed to target GFP binds and cleaves the double-stranded DNA region encoding GFP, resulting in depletion of GFP fluorescence. The FDA assay involves in vitro transcription and translation, allowing production of an RNP from a DNA template encoding a CLUST.133120 effector and a DNA template containing a pre-crRNA sequence under a T7 promoter with direct repeat (DR)-spacer-direct repeat (DR); the spacer targeted GFP. In the same one-pot reaction, GFP and RFP were also produced as both the target and the fluorescence reporter (FIG. 15A). The target GFP plasmid sequence is set forth in SEQ ID NO: 192, and the RFP plasmid sequence is set forth in SEQ ID NO: 193. GFP and RFP fluorescence values were measured every 20 min at 37° C. for 12 hr, using a TECAN Infinite F Plex plate reader. Since RFP was not targeted, its fluorescence was not affected and was therefore used as an internal signal control.

SEQ ID NO: 192
ccccttgtattactgtttatgtaagcagacaggatgcgtc
cggcgtagaggatcgagatctcCAAAAAATGGCTGTTTTT
GAAAAAAATTCTAAAGGTTGTTTTACGACAGACGATAACA
GGGTTgaaataattttgtttaactttaagaaggagATTTA
AATatgAAAATCGAAGAAGGTAAAGGTCACCATCACCATC
ACCACggatccatgacggcattgacggaaggtgcaaaact
gtttgagaaagagatcccgtatatcaccgaactggaaggc
gacgtcgaaggtatgaaatttatcattaaaggcgagggta
ccggtgacgcgaccacgggtaccattaaagcgaaatacat
ctgcactacgggcgacctgccggtcccgtgggcaaccctg
gtgagcaccctgagctacggtgttcagtgtttcgccaagt
acccgagccacatcaaggatttctttaagagcgccatgcc
ggaaggttatacccaagagcgtaccatcagcttcgaaggc
gacggcgtgtacaagacgcgtgctatggttacctacgaac
gcggttctatctacaatcgtgtcacgctgactggtgagaa
ctttaagaaagacggtcacattctgcgtaagaacgttgca
ttccaatgcccgccaagcattctgtatattctgcctgaca
ccgttaacaatggcatccgcgttgagttcaaccaggcgta
cgatattgaaggtgtgaccgaaaaactggttaccaaatgc
agccaaatgaatcgtccgttggcgggctccgcggcagtgc
atatcccgcgttatcatcacattacctaccacaccaaact
gagcaaagaccgcgacgagcgccgtgatcacatgtgtctg
gtagaggtcgtgaaagcggttgatctggacacgtatcagT
AATAAaaagcccgaaaggaagctgagttggctgctgccac
cgctgagcaataactagcataaccccttggggcctctaaa
cgggtcttgaggggttttttgctgaaaggaggaactatat
ccggCTTCCTCGCTCACTGACTCGCTGCGCTCGGTCGTTC
GGCTGCGGCGAGCGGTATCAGCTCACTCAAAGGCGGTAAT
ACGGTTATCCACAGAATCAGGGGATAACGCAGGAAAGAAC
ATGTGAGCAAAAGGCCAGCAAAAGGCCAGGAACCGTAAAA
AGGCCGCGTTGCTGGCGTTTTTCCATAGGCTCCGCCCCCC
TGACGAGCATCACAAAAATCGACGCTCAAGTCAGAGGTGG
CGAAACCCGACAGGACTATAAAGATACCAGGCGTTTCCCC
CTGGAAGCTCCCTCGTGCGCTCTCCTGTTCCGACCCTGCC
GCTTACCGGATACCTGTCCGCCTTTCTCCCTTCGGGAAGC
GTGGCGCTTTCTCATAGCTCACGCTGTAGGTATCTCAGTT
CGGTGTAGGTCGTTCGCTCCAAGCTGGGCTGTGTGCACGA
ACCCCCCGTTCAGCCCGACCGCTGCGCCTTATCCGGTAAC
TATCGTCTTGAGTCCAACCCGGTAAGACACGACTTATCGC
CACTGGCAGCAGCCACTGGTAACAGGATTAGCAGAGCGAG
GTATGTAGGCGGTGCTACAGAGTTCTTGAAGTGGTGGCCT
AACTACGGCTACACTAGAAGAACAGTATTTGGTATCTGCG
CTCTGCTGAAGCCAGTTACCTTCGGAAAAAGAGTTGGTAG
CTCTTGATCCGGCAAACAAACCACCGCTGGTAGCGGTGGT
TTTTTTGTTTGCAAGCAGCAGATTACGCGCAGAAAAAAAG
GATCTCAAGAAGATCCTTTGATCTTTTCTACGGGGTCTGA
CGCTCAGTGGAACGAAAACTCACGggtggcacttttcggg
gaaatgtgcgcggaacccctatttgtttatttttctaaat
acattcaaatatgtatccgctcatgaattaattcttagaa
aaactcatcgagcatcaaatgaaactgcaatttattcata
tcaggattatcaataccatatttttgaaaaagccgtttct
gtaatgaaggagaaaactcaccgaggcagttccataggat
ggcaagatcctggtatcggtctgcgattccgactcgtcca
acatcaatacaacctattaatttcccctcgtcaaaaataa
ggttatcaagtgagaaatcaccatgagtgacgactgaatc
cggtgagaatggcaaaagtttatgcatttctttccagact
tgttcaacaggccagccattacgctcgtcatcaaaatcac
tcgcatcaaccaaaccgttattcattcgtgattgcgcctg
agcgagacgaaatacgcgatcgctgttaaaaggacaatta
caaacaggaatcgaatgcaaccggcgcaggaacactgcca
gcgcatcaacaatattttcacctgaatcaggatattcttc
taatacctggaatgctgttttcccggggatcgcagtggtg
agtaaccatgcatcatcaggagtacggataaaatgcttga
tggtcggaagaggcataaattccgtcagccagtttagtct
gaccatctcatctgtaacatcattggcaacgctacctttg
ccatgtttcagaaacaactctggcgcatcgggcttcccat
acaatcgatagattgtcgcacctgattgcccgacattatc
gcgagcccatttatacccatataaatcagcatccatgttg
gaatttaatcgcggcctagagcaagacgtttcccgttgaa
tatggctcataaca
SEQ ID NO: 193
ccccttgtattactgtttatgtaagcagacaggatgcgtc
cggcgtagaggatcgagatctcCAAAAAATGGCTGTTTTT
GAAAAAAATTCTAAAGGTTGTTTTACGACAGACGATAACA
GGGTTgaaataattttgtttaactttaagaaggagATTTA
AATatgAAAATCGAAGAAGGTAAAGGTCACCATCACCATC
ACCACggatccaTGGTCAGCAAGGGGGAGGAAGACAATAT
GGCTATTATCAAGGAATTCATGCGCTTCAAGGTGCATATG
GAAGGAAGCGTGAATGGACACGAATTCGAGATCGAAGGCG
AGGGGGAGGGTCGCCCTTATGAAGGCACACAAACAGCTAA
ACTGAAAGTGACGAAGGGAGGGCCGCTTCCCTTCGCTTGG
GACATTCTTTCACCCCAGTTCATGTATGGTTCAAAGGCTT
ATGTCAAGCACCCGGCGGACATTCCAGACTACTTAAAATT
GTCGTTCCCCGAGGGGTTTAAATGGGAACGCGTTATGAAT
TTCGAGGATGGGGGAGTCGTAACGGTTACCCAGGACAGTA
GCCTGCAGGATGGCGAGTTCATCTACAAAGTGAAATTGCG
CGGGACGAACTTCCCTAGCGATGGGCCAGTCATGCAGAAG
AAAACGATGGGATGGGAAGCGTCATCCGAGCGCATGTATC
CTGAAGATGGTGCTTTAAAAGGTGAGATCAAGCAGCGTTT
GAAACTGAAGGACGGGGGCCATTATGATGCTGAAGTTAAA
ACGACATATAAGGCCAAGAAGCCAGTTCAACTGCCAGGGG
CTTATAATGTTAATATTAAATTAGACATTACGAGCCATAA
TGAAGATTACACGATTGTCGAGCAATACGAGCGCGCAGAA
GGACGCCACTCAACGGGGGGCATGGACGAGCTGTACAAGT
AAaaagcccgaaaggaagctgagttggctgctgccaccgc
tgagcaataactagcataaccccttggggcctctaaacgg
gtcttgaggggttttttgctgaaaggaggaactatatccg
gCTTCCTCGCTCACTGACTCGCTGCGCTCGGTCGTTCGGC
TGCGGCGAGCGGTATCAGCTCACTCAAAGGCGGTAATACG
GTTATCCACAGAATCAGGGGATAACGCAGGAAAGAACATG
TGAGCAAAAGGCCAGCAAAAGGCCAGGAACCGTAAAAAGG
CCGCGTTGCTGGCGTTTTTCCATAGGCTCCGCCCCCCTGA
CGAGCATCACAAAAATCGACGCTCAAGTCAGAGGTGGCGA
AACCCGACAGGACTATAAAGATACCAGGCGTTTCCCCCTG
GAAGCTCCCTCGTGCGCTCTCCTGTTCCGACCCTGCCGCT
TACCGGATACCTGTCCGCCTTTCTCCCTTCGGGAAGCGTG
GCGCTTTCTCATAGCTCACGCTGTAGGTATCTCAGTTCGG
TGTAGGTCGTTCGCTCCAAGCTGGGCTGTGTGCACGAACC
CCCCGTTCAGCCCGACCGCTGCGCCTTATCCGGTAACTAT
CGTCTTGAGTCCAACCCGGTAAGACACGACTTATCGCCAC
TGGCAGCAGCCACTGGTAACAGGATTAGCAGAGCGAGGTA
TGTAGGCGGTGCTACAGAGTTCTTGAAGTGGTGGCCTAAC
TACGGCTACACTAGAAGAACAGTATTTGGTATCTGCGCTC
TGCTGAAGCCAGTTACCTTCGGAAAAAGAGTTGGTAGCTC
TTGATCCGGCAAACAAACCACCGCTGGTAGCGGTGGTTTT
TTTGTTTGCAAGCAGCAGATTACGCGCAGAAAAAAAGGAT
CTCAAGAAGATCCTTTGATCTTTTCTACGGGGTCTGACGC
TCAGTGGAACGAAAACTCACGggtggcacttttcggggaa
atgtgcgcggaacccctatttgtttatttttctaaataca
ttcaaatatgtatccgctcatgaattaattcttagaaaaa
ctcatcgagcatcaaatgaaactgcaatttattcatatca
ggattatcaataccatatttttgaaaaagccgtttctgta
atgaaggagaaaactcaccgaggcagttccataggatggc
aagatcctggtatcggtctgcgattccgactcgtccaaca
tcaatacaacctattaatttcccctcgtcaaaaataaggt
tatcaagtgagaaatcaccatgagtgacgactgaatccgg
tgagaatggcaaaagtttatgcatttctttccagacttgt
tcaacaggccagccattacgctcgtcatcaaaatcactcg
catcaaccaaaccgttattcattcgtgattgcgcctgagc
gagacgaaatacgcgatcgctgttaaaaggacaattacaa
acaggaatcgaatgcaaccggcgcaggaacactgccagcg
catcaacaatattttcacctgaatcaggatattcttctaa
tacctggaatgctgttttcccggggatcgcagtggtgagt
aaccatgcatcatcaggagtacggataaaatgcttgatgg
tcggaagaggcataaattccgtcagccagtttagtctgac
catctcatctgtaacatcattggcaacgctacctttgcca
tgtttcagaaacaactctggcgcatcgggcttcccataca
atcgatagattgtcgcacctgattgcccgacattatcgcg
agcccatttatacccatataaatcagcatccatgttggaa
tttaatcgcggcctagagcaagacgtttcccgttgaatat
ggctcataaca

[0403] 3 GFP targets (plus 1 non-target) were designed for the effector of SEQ ID NO: 1. RNA guide sequences, target sequences, and the non-target control sequences used for the FDA assay are listed in Table 6. The pre-crRNA sequences shown in Table 6 further include a T7 promoter at the 5′ end and a hairpin motif that caps the 3′ end of the RNA to ensure that the RNA is not degraded by nucleases present in the in vitro transcription and translation mixture. A 5′-TTN-3′ PAM was used for the target sequences.

TABLE 6
RNA guide and Target Sequences for FDA Assay.

| Target | pre-crRNA Sequence | Target Sequence |
|---|---|---|
| Target 1 | CCAACCAATGCC | tcgtctgtcgtaaaac |
| | AGCGCGACGGCT | aacctttagaattttt |
| | TATGAGTCGCGA | ttc |
| | Ctcgtctgtcgt | (SEQ ID |
| | aaaacaaccttt | NO: 82) |
| | agaatttttttc | |
| | CCAACCAATGCC | |
| | AGCGCGACGGCT | |
| | TATGAGTCGCGA | |
| | C | |
| | (SEQ ID | |
| | NO: 916) | |
| Target 2 | gaaattaatacg | cagttcggtgat |
| | actcactatagg | atacgggatctc |
| | gCCAACCAATGC | tttctcaaaca |
| | CAGCGCGACGGC | (SEQ ID |
| | TTATGAGTCGCG | NO: 83) |
| | ACcagttcggtg | |
| | atatacgggatc | |
| | tctttctcaaac | |
| | aCCAACCAATGC | |
| | CAGCGCGACGGC | |
| | TTATGAGTCGCG | |
| | AC | |
| | (SEQ ID | |
| | NO: 917) | |
| Target 3 | gaaattaatacg | ggtgatatacgg |
| | actcactatagg | gatctctttctc |
| | gCCAACCAATGC | aaacagttttg |
| | CAGCGCGACGGC | (SEQ ID |
| | TTATGAGTCGCG | NO: 84) |
| | ACggtgatatac | |
| | gggatctctttc | |
| | tcaaacagtttt | |
| | gCCAACCAATGC | |
| | CAGCGCGACGGC | |
| | TTATGAGTCGCG | |
| | AC | |
| | (SEQ ID | |
| | NO: 918) | |
| Non-Target 4 | agaaattaatac | |
| | gactcactatag | |
| | ggCCAACCAATG | |
| | CCAGCGCGACGG | |
| | CTTATGAGTCGC | |
| | GACaggtgctac | |
| | atttgaagagat | |
| | aaattgcactga | |
| | aaCCAACCAATG | |
| | CCAGCGCGACGG | |
| | CTTATGAGTCGC | |
| | GACtaacccctc | |
| | tctaaacggagg | |
| | ggttt | |
| | (SEQ ID | |
| | NO: 919) | |

[0404] GFP signal was normalized to RFP signal, then the average fluorescence of three technical replicates was taken at each time point. GFP fluorescence depletion was then calculated by dividing the GFP signal of an effector incubated with a non-GFP targeting RNA guide (which instead targets a kanamycin resistance gene and does not deplete GFP signal) by the GFP signal of an effector incubated with a GFP targeting RNA guide. The resulting value is referred to as “Depletion” in FIG. 15B.

[0405] A Depletion of one or approximately one indicated that there was little to no difference in GFP depletion with respect to a non-GFP targeting pre-crRNA and a GFP targeting pre-crRNA (e.g., 10 RFU/10 RFU=1). A Depletion of greater than one indicated that there was a difference in GFP depletion with respect to a non-GFP targeting pre-crRNA and a GFP targeting pre-crRNA (e.g., 10 RFU/5 RFU=2). Depletion of the GFP signal indicated that the effector formed a functional RNP and interfered with the production of GFP by introducing double-stranded DNA cleavage within the GFP coding region. The extent of the GFP depletion was largely correlated to the specific activity of a CLUST.133120 effector.

[0406] FIG. 15B shows depletion curves for RNPs formed by the effector of SEQ ID NO: 1, measured every 20 minutes for each of the GFP targets (Targets 1-3). At each target, the depletion values for RNPs formed with the effector of SEQ ID NO: 1 were greater than one.

[0407] This indicated that the CLUST.133120 effector formed a functional RNP capable of interfering with the production of GFP.

### Example 4-Identification of Components of CLUST.099129 CRISPR-Cas System

[0408] This protein family was identified using the computational methods described above. The CLUST.099129 system comprises single effectors associated with CRISPR systems found in uncultured metagenomic sequences collected from freshwater, wastewater, soil, and rhizosphere environments as well as from Anaerolineae bacterium (TABLE 9). Exemplary CLUST.099129 effectors include those shown in TABLES 9 and 10, below. Examples of direct repeat sequences for these systems are shown in TABLE 11. Optionally, the system includes a tracrRNA that is contained in a non-coding sequence listed in TABLE 12.

TABLE 9
Representative CLUST.099129 Effector Proteins

| | | # | Effector | SEQ |
|---|---|---|---|---|
| Source | Effector Accession | Spacers | Size | ID NO |
| wastewater metagenome | SRR6837557_1470862_2\|M | 3 | 541 | 101 |
| terrestrial-soil-tropical | 3300012971\|Ga0126369_10127246_1\|M | 7 | 586 | 102 |
| forest soil | | | | |
| terrestrial-soil-tropical | 3300005764\|Ga0066903_100343966_1\|M | 6 | 600 | 103 |
| forest soil | | | | |
| Anaerolineae bacterium | PMDR01000701_10\|P | 8 | 522 | 104 |
| aquatic-freshwater-bog | 3300014158\|Ga0181521_10019591_3\|P | 2 | 520 | 105 |
| aquatic-freshwater-bog | 3300014159\|Ga0181530_10005765_11\|M | 2 | 520 | 106 |
| aquatic-freshwater-bog | 3300014638\|Ga0181536_10002122_15\|P | 2 | 520 | 107 |
| aquatic-freshwater- | 3300009632\|Ga0116102_1009001_2\|P | 5 | 520 | 108 |
| peatland | | | | |
| aquatic-freshwater- | 3300009643\|Ga0116110_1007258_2\|M | 5 | 534 | 109 |
| peatland | | | | |
| aquatic-freshwater- | 3300009643\|Ga0116110_1007258_2\|P | 5 | 520 | 110 |
| peatland | | | | |
| aquatic-freshwater- | 3300017996\|Ga0187891_1001667_23\|M | 2 | 520 | 111 |
| peatland | | | | |
| aquatic-freshwater- | 3300018003\|Ga0187876_1014226_2\|P | 2 | 520 | 112 |
| peatland | | | | |
| aquatic-freshwater- | 3300025453\|Ga0208455_1001030_8\|P | 5 | 520 | 113 |
| peatland | | | | |
| aquatic-freshwater- | 3300025507\|Ga0208188_1002252_2\|M | 5 | 534 | 114 |
| peatland | | | | |
| aquatic-freshwater- | 3300025507\|Ga0208188_1002252_2\|P | 5 | 520 | 115 |
| peatland | | | | |
| biofilm metagenome | PJQE01000204_1\|M | 2 | 526 | 116 |
| plants-rhizosphere- | 3300006845\|Ga0075421_100006223_8\|P | 2 | 586 | 117 |
| populus rhizosphere | | | | |
| plants-rhizosphere- | 3300006847\|Ga0075431_100017297_1\|M | 2 | 586 | 118 |
| populus rhizosphere | | | | |
| plants-rhizosphere- | 3300027909\|Ga0209382_10008589_8\|P | 2 | 586 | 119 |
| populus rhizosphere | | | | |
| soil metagenome | ODAK010035847_2\|M | 4 | 506 | 120 |
| soil metagenome | SRR6266511_1572288_18\|M | 4 | 615 | 121 |
| soil metagenome | SRR6266511_203987_6\|P | 5 | 673 | 122 |
| soil metagenome | SRR6266511_239355_1\|M | 17 | 602 | 123 |
| soil metagenome | SRR6266511_838544_1\|M | 7 | 600 | 124 |
| terrestrial-soil-fen | 3300014502\|Ga0182021_10233972_2\|M | 3 | 522 | 125 |
| terrestrial-soil-surface | 3300005529\|Ga0070741_10001368_72\|P | 2 | 547 | 126 |
| soil | | | | |
| terrestrial-soil-tropical | 3300010046\|Ga0126384_10047357_3\|M | 5 | 615 | 127 |
| forest soil | | | | |
| terrestrial-soil-tropical | 3300010359\|Ga0126376_10030051_2\|M | 5 | 615 | 128 |
| forest soil | | | | |
| terrestrial-soil-tropical | 3300010362\|Ga0126377_10111069_2\|M | 4 | 615 | 129 |
| forest soil | | | | |
| terrestrial-soil-vadose | 3300012204\|Ga0137374_10002290_4\|M | 5 | 673 | 130 |
| zone soil | | | | |
| terrestrial-soil-vadose | 3300012204\|Ga0137374_10009879_6\|P | 4 | 615 | 131 |
| zone soil | | | | |
| terrestrial-soil-vadose | 3300012350\|Ga0137372_10022207_3\|M | 4 | 615 | 132 |
| zone soil | | | | |
| terrestrial-soil-vadose | 3300012350\|Ga0137372_10022207_4\|P | 4 | 614 | 133 |
| zone soil | | | | |
| terrestrial-soil-vadose | 3300012353\|Ga0137367_10000906_4\|M | 5 | 673 | 134 |
| zone soil | | | | |
| terrestrial-soil-vadose | 3300012353\|Ga0137367_10004593_5\|M | 4 | 615 | 135 |
| zone soil | | | | |
| terrestrial-soil-vadose | 3300012355\|Ga0137369_10001944_2\|P | 5 | 673 | 136 |
| zone soil | | | | |
| terrestrial-soil-vadose | 3300012355\|Ga0137369_10007378_6\|M | 4 | 615 | 137 |
| zone soil | | | | |
| terrestrial-soil-vadose | 3300012355\|Ga0137369_10043960_1\|M | 8 | 602 | 138 |
| zone soil | | | | |
| terrestrial-soil-vadose | 3300012358\|Ga0137368_10001884_4\|M | 5 | 673 | 139 |
| zone soil | | | | |
| terrestrial-soil-vadose | 3300012358\|Ga0137368_10007571_6\|P | 4 | 615 | 140 |
| zone soil | | | | |
| terrestrial-soil-vadose | 3300012360\|Ga0137375_10064112_1\|P | 5 | 673 | 141 |
| zone soil | | | | |
| terrestrial-soil-vadose | 3300012532\|Ga0137373_10033017_1\|P | 5 | 673 | 142 |
| zone soil | | | | |
| terrestrial-soil-vadose | 3300012944\|Ga0137410_10000075_50\|P | 2 | 548 | 143 |
| zone soil | | | | |
| terrestrial-soil-vadose | 3300015245\|Ga0137409_10000164_50\|P | 2 | 548 | 144 |
| zone soil | | | | |
| wastewater metagenome | SRR6837571_912213_1\|M | 3 | 541 | 145 |

TABLE 10
Amino acid sequences of Representative
CLUST.099129 Effector Proteins

>SRR6837557_14708622|M
[wastewater metagenome]
MRTTKTPDYSNKNLSFWCEPVGEMPSVVFEKGRQMNRLWN
LLVECHTTFLAKHDGKKGGERTEAYKTEWQPLLKRIYNNE
AKSFGLNSDETNFVTDGFKNAIRAGYDQKRPGAGMPTFKA
RLRSIHIPFCDRNGGRAPAWFFEKPDRRIHLRPILLPDAA
KRVIDRGPARGHFTVDGQAISLRANLSQSIPPGALVKRVS
LVGKLERPFGWQWKLMFSIAYPPPPPAQSDAACVGVDLGY
RRFEDRIRFGMIFDGSRFHELALPLDLTNRRAAKAGKRWD
IREIWELESQIGCGVEACKASLKQLPKTDWPEEARGAMQG
IAKMRERGLLKVRRLLRDAEITVPELETWWDDYQRLFRKS
RHLELQIVATRTHLYRNLALSLARSCAAIAWEGDLSLRDL
AESAGKKKKQRKEAIAEGVSAERSPEDRIEEAAQKWRAYV
CLSDFRRFLKEAVEKTTAALIDRPAAGTTNTCEECGAPVD
TGPDLVLTCANGHRRDQDKGSAKMLFEEIDEGYRQQSAPL
SLDLFTDQAVRAIRTLNREMV
(SEQ ID NO: 101)
>3300012971|Ga0126369_10127246_1|M
[terrestrial-soil-tropical forest soil]
MIEEKTAKRKNPVRRERLNKDWPIKVYTYDCWPQEKPLKA
LWDTAHEMRRLWNDFTAIFRKILTDDKKDEASRPLLSKEE
RAILWAPINTKPLREIAKQRKKRLDAGCREAVVVRFLTTV
GNWRKNPSRCGPPRFQRADEMNAISIPLVYNDGKSAEWLI
GGEGTSSVRETRNLKTEAPEEYLNNGHFCVGVTRERLNLH
IAYGGRSGRKKYYLPEGCRIKQVTLCGRRDSAFNWSWSFQ
VRLEHPPEPARQPTGRVCGWDSCGWRLMDGYIRLGVIADN
AGHFYELMVPLAIGAACRRMRREKEYCLKQGWEYGKPLSF
DDAEALDARYGTTLEACKTQVRKIYEGEKENWPAGARKIM
SGIMKMRDTGLRRLRRKLEPIESEAKRTIDDWDAEAAKMN
ETIRAFEIHANNAKRDAYRQIAAWLNAFDIIAWEGDLSLK
QMAEKAGKKKQKRKEAHEETGQWNERTPEERQFEASQKYR
QIAGQRQLREFVKQKHESRLQNEKAAYSTRTCPECGGTIE
PGRKLLLVCENGHVRDQDVSAALHFLNKIEGVASITAPPV
EIPAHLGPYLRVMDASEVRLELAEKR
(SEQ ID NO: 102)
>3300005764|Ga0066903_100343966_1|M
[terrestrial-soil-tropical forest soil]
MEDISKKPERRKNPARRERLNKDWPIKVHNYRCSPNEKPP
QALWDTAHEMRRLWNDLTAVFRKILAEDKKDEDGKPLLSK
EERANLWAPINVKPLREIAKQRKDKLDIGCREYVVTHFIT
TVNNWRRNPRRFGPPRFQNAADMDSVHIPLVYTDGKSADW
LTGGNGTAWVRDTLHIKKNALRDKDGCPVLSENELEEYLN
NGHFCVGITREKLSLHIAYGGRSGRKKYHLPDKCRIKQVA
LCGRRNSAFGWSWSFQVRLEHPPDPERQVTGRVCGWDSGG
WRKMDSYIRLGVIADNAGHFYELMVPLAIGAASHRLRHER
EHCQKNGWEYNKPITFDDAEALQSRYGLALEACKTNLRII
FEEEKEKWPDDARKIMGGIIRMRDDGLRRLRRKLDEIESA
AKQTIDDWDAEAAKLNETIRAFQRHAGNAKRNAYRQITAW
LSAFDRIAWEGDLNLKWMAEQPGKKKQERKKTLAETGQWG
ERTAEDRQLEASQRYRQIVGQYRLRELVKQTHEARLQNEK
TAHSTRTCSECGARINPGGKLMLVCEKGHKRDQDVTASLY
LLSKIEGYASISGPPIEIPAHLSPYLRVMTASDVALEIVE
(SEQ ID NO: 103)
>PMDR01000701_10|P
[Anaerolineae bacterium]
MRPKKNADTIYQTYKFWIKPSDPLPQLLWDKAKAMNAAWT
SLVLMRQETLETWMAQRDTLTADQKRAFWNTFNLAVREKI
EECELDWETSGVLHDRFLVAHQRALKDKADLHGRTRLQRI
LLVHRYTGGGIPIEKLLSTRAWRFALDAFPTEDVYATNTR
QARRGRQTQGRFGLDNETAVEFSIILHRPLPPAAIVKRVA
LSGRRQKPPAHEWDWALVVSVEVPNPSRTAAGRVIGIDLG
WRKIDDYLRIGYAADDTDQQIELRLPLDFSTQKARSAGYP
CNHAELRALEGWIAVAVDATK
AAIGELITVPSLVLMRQGGLVRLQRTLSEKPDLSEAEVEA
LRILGAWRKQNDRLQKIYNFSTARFAARRRWLYQNLAAWL
CRNYDVIAIEGDLDVKGLAEEPDPDPALKAAQRYRQIAAP
GELREIIRWTAQREGVIVKDCNTAYSTTTCFTCGEQAEAG
PDLILECPAGHRFDQDANAAANLLSQILPLTEVQDGLRKN
QRDFLRIPPELQMVAWVHRD
(SEQ ID NO: 104)
>3300014158|Ga018152l_10019591_3|P
[aquatic-freshwater-bog]
MQRERKRKESHDIRPHKYRAWFAEGDGTRLPEPVYLLAKR
MQDCWTDIALHDQQAYDEWRTAHPVPTPPAGLEGEALAKW
RKENWPKPPKPFYVGNQEWAEGRVGQANLPDELGQTILDR
LAVTFKNMKKGGGPPKPHGRLDKFTFHHRYTGGGLPVNKL
GRQLGERFRISIPPPQAYQPKEDIMNPRASRCQRVCLAWF
RVDGVPVRLNVMMHRSLPEGDVYVKRVALVGRKSSAALPW
EVYLVFTLEVPSETEAQAPLGTRCGIDVGWRKLDDGRMRV
AVLHDGKPTPEELIMPLRIYDRKLGEVSLERLANLKRCRD
GLLERTKATVAAMFGTPLSDWTRIRNGGLIRLMREDGAPA
EVIAMLETWKRDSDRYLRMERMLENRMRRHYEWRYGKWAK
DVATRHRTVRIKKMDQKEMWAVEKTKDYPALKASAERRKL
AAGGSLLAMVRHAVRKACGNLVEVEAAHTTDTCAACGSHF
EAGAGLMGRCEQGHVMDQDWNAAGNIYAGRAGATAQAAVG
(SEQ ID NO: 105)
>3300014159|Ga0181530_10005765_11|M
[aquatic-freshwater-bog]
MQRERKRKESHDIRPHKYRAWFAEGDGTRLPEPVYLLAKR
MQDCWTDIALHDQQAYDEWRTAHPVPTPPAGLEGEALAKW
RKENWPKPPKPFYVGNQEWAEGRVGQANLPDELGQTILDR
LAVTFKNMKKGGGPPKPHGRLDKFTFHHRYTGGGLPVNKL
GRQLGERFRISIPPPQAYQPKEDIMNPRASRCQRVCLAWF
RVDGVPVRLNVMMHRSLPEGDVYVKRVALVGRKSSAALPW
EVYLVFTLEVPSETEAQAPLGTRCGIDVGWRKLDDGRMRV
AVLHDGKPTPEELIMPLRIYDRKLGEVSLERLANLKRCRD
GLLERTKATVAAMFGTPLSDWTRIRNGGLIRLMREDGAPA
EVIAMLETWKRDSDRYLRMERMLENRMRRHYEWRYGKWAK
DVATRHRTVRIKKMDQKEMWAVEKTKDYPALKASAERRKL
AAGGSLLAMVRHAVRKACGNLVEVEAAHTTDTCAACGSHF
EAGAGLMGRCEQGHVMDQDWNAAGNIYAGRAGATAQAAVG
(SEQ ID NO: 106)
>3300014638|Ga0181536_10002122_15|P
[aquatic-freshwater-bog]
MQRERKRKESHDIRPHKYRAWFAEGDGTRLPEPVYLLAKR
MQDCWTDIALHDQQAYDEWRTAHPVPTPPAGLEGEALAKW
RKENWPKPPKPFYVGNQEWAEGRVGQANLPDELGQTILDR
LAVTFKNMKKGGGPPKPHGRLDKFTFHHRYTGGGLPVNKL
GRQLGERFRISIPPPQAYQPKEDIMNPRASRCQRVCLAWF
RVDGVPVRLNVMMHRSLPEGDVYVKRVALVGRKSSAALPW
EVYLVFTLEVPSETEAQAPLGTRCGIDVGWRKLDDGRMRV
AVLHDGKPTPEELIMPLRIYDRKLGEVSLERLANLKRCRD
GLLERTKATVAAMFGTPLSDWTRIRNGGLIRLMREDGAPA
EVIAMLETWKRDSDRYLRMERMLENRMRRHYEWRYGKWAK
DVATRHRTVRIKKMDQKEMWAVEKTKDYPALKASAERRKL
AAGGSLLAMVRHAVRKACGNLVEVEAAHTTDTCAACGSHF
EAGAGLMGRCEQGHVMDQDWNAAGNIYAGRAGATAQAAVG
(SEQ ID NO: 107)
>3300009632|Ga0116102_1009001_2|P
[aquatic-freshwater-peatland]
MQRERKRKETHDIRPHKYRAWFAEGDGSRLPEPVFALARR
MQDCWTDIALHNQDAYDEWRMAHPAPAAPAGLEGQTIEKW
RRENWPKLPKPYYEGNQAWAESRVRQANLPGELGQTILDR
LSVTFKNMKKGGGPPKPHYRLDRFAFHHRYTSGGLPVLGL
RSQRSQRFHILLPSPHAYQTKGGTKNPRELRRQRVCPAWF
CVDGVSARLNVMMHRPLPEGDAYVKRVALVGKKSSAAMPW
EVSLALTVEVPVAKEPQAPAGTRCGLDVGWRKLDKDRMRV
AVLYNGGPNSEELVMPLRIHDRKLGEVSLERLARLNRCRD
ALLERTKAAVATMLGTEPSAWAQMRNGGLVRLMREDGAPP
EVIEVLEAWKQDNDRYLRLERLVEAHLRRHYEWRYGKWAK
DVATRYRTVRIRKMGQKEMWAVEKTKDYPALKASAERRKL
AAGGSLLSMVRHAVRKACGNLVEVEAAHTTDTCAACGSHF
EAGAGLMGRCEQGHVMDQDWNAAGNIYAGRAGATAQAAVG
(SEQ ID NO: 108)
>3300009643|Ga0116110_1007258_2|M
[aquatic-freshwater-peatland]
MSARTIEERKGKTSMQRERKRKETHDIRPHKYRAWFAEGD
GTRLPEPIFALAKRMQDCWTDIALHNQDAFEEWRMAHPLP
APPDGLAGEAFEDWRRKNWPRPPKPFYEANQAWAESRVRQ
ANLPGELGETILDRLSVTVNNMKKGGGPPKPHYRLDRFAF
HHRYTSGGLPVLGLRSQRSQRFHILLPPPNAYQPKGGMRN
PHELRRQRVCPAWFCVDGVPVRLNVMMHRPLPEGDAYLKR
VALVGKKSSAALPWEVFLVLTVEVPLAKEPQAPAGTRCGL
DVGWRKLDKDRMRVAVLYNGGPNSEELVMPLRIHDRKLGE
VSLERLARLNRCRDALLERTKAAVATMLGTEPSAWAQMRN
GGLVRLMREDGAPPEVIEVLEAWKQDNDRYLRLERLVEAH
LRRHYEWRYGKWAKDVATRYRTVRIRKMGQKEMWAVEKTK
DYPALKASAERRKLAAGGSLLSMVRHAVRKACGNLVEVEA
AHTTDTCAACGSHFEAGAGLMGRCEQGHVMDQDWNAAGNI
YAGRAGATAQAAVG
(SEQ ID NO: 109)
>3300009643|Ga0116110_1007258_2|P
[aquatic-freshwater-peatland]
MQRERKRKETHDIRPHKYRAWFAEGDGTRLPEPIFALAKR
MQDCWTDIALHNQDAFEEWRMAHPLPAPPDGLAGEAFEDW
RRKNWPRPPKPFYEANQAWAESRVRQANLPGELGETILDR
LSVTVNNMKKGGGPPKPHYRLDRFAFHHRYTSGGLPVLGL
RSQRSQRFHILLPPPNAYQPKGGMRNPHELRRQRVCPAWF
CVDGVPVRLNVMMHRPLPEGDAYLKRVALVGKKSSAALPW
EVFLVLTVEVPLAKEPQAPAGTRCGLDVGWRKLDKDRMRV
AVLYNGGPNSEELVMPLRIHDRKLGEVSLERLARLNRCRD
ALLERTKAAVATMLGTEPSAWAQMRNGGLVRLMREDGAPP
EVIEVLEAWKQDNDRYLRLERLVEAHLRRHYEWRYGKWAK
DVATRYRTVRIRKMGQKEMWAVEKTKDYPALKASAERRKL
AAGGSLLSMVRHAVRKACGNLVEVEAAHTTDTCAACGSHF
EAGAGLMGRCEQGHVMDQDWNAAGNIYAGRAGATAQAAVG
(SEQ ID NO: 110)
>3300017996|Ga0187891_1001667_23|M
[aquatic-freshwater-peatland]
MQRERKRKESHDIRPHKYRAWFAEGDGTRLPEPVYLLAKR
MQDCWTDIALHDQQAYDEWRTAHPVPTPPAGLEGEALAKW
RKENWPKPPKPFYVGNQEWAEGRVGQANLPDELGQTILDR
LAVTFKNMKKGGGPPKPHGRLDKFTFHHRYTGGGLPVNKL
GRQLGERFRISIPPPQAYQPKEDIMNPRASRCQRVCLAWF
RVDGVPVRLNVMMHRSLPEGDVYVKRVALVGRKSSAALPW
EVYLVFTLEVPSETEAQAPLGTRCGIDVGWRKLDDGRMRV
AVLHDGKPTPEELIMPLRIYDRKLGEVSLERLANLKRCRD
GLLERTKATVAAMFGTPLSDWTRIRNGGLIRLMREDGAPA
EVIAMLETWKRDSDRYLRMERMLENRMRRHYEWRYGKWAK
DVATRHRTVRIKKMDQKEMWAVEKTKDYPALKASAERRKL
AAGGSLLAMVRHAVRKACGNLVEVEAAHTTDTCAACGSHF
EAGAGLMGRCEQGHVMDQDWNAAGNIYAGRAGATAQAAVG
(SEQ ID NO: 111)
>3300018003|Ga0187876_1014226_2|P
[aquatic-freshwater-peatland]
MQRERKRKESHDIRPHKYRAWFAEGDGTRLPEPVYLLAKR
MQDCWTDIALHDQQAYDEWRTAHPVPTPPAGLEGEALAKW
RKENWPKPPKPFYVGNQEWAEGRVGQANLPDELGQTILDR
LAVTFKNMKKGGGPPKPHGRLDKFTFHHRYTGGGLPVNKL
GRQLGERFRISIPPPQAYQPKEDIMNPRASRCQRVCLAWF
RVDGVPVRLNVMMHRSLPEGDVYVKRVALVGRKSSAALPW
EVYLVFTLEVPSETEAQAPLGTRCGIDVGWRKLDDGRMRV
AVLHDGKPTPEELIMPLRIYDRKLGEVSLERLANLKRCRD
GLLERTKATVAAMFGTPLSDWTRIRNGGLIRLMREDGAPA
EVIAMLETWKRDSDRYLRMERMLENRMRRHYEWRYGKWAK
DVATRHRTVRIKKMDQKEMWAVEKTKDYPALKASAERRKL
AAGGSLLAMVRHAVRKACGNLVEVEAAHTTDTCAACGSHF
EAGAGLMGRCEQGHVMDQDWNAAGNIYAGRAGATAQAAVG
(SEQ ID NO: 112)
>3300025453|Ga0208455_1001030_8|P
[aquatic-freshwater-peatland]
MQRERKRKETHDIRPHKYRAWFAEGDGSRLPEPVFALARR
MQDCWTDIALHNQDAYDEWRMAHPAPAAPAGLEGQTIEKW
RRENWPKLPKPYYEGNQAWAESRVRQANLPGELGQTILDR
LSVTFKNMKKGGGPPKPHYRLDRFAFHHRYTSGGLPVLGL
RSQRSQRFHILLPSPHAYQTKGGTKNPRELRRQRVCPAWF
CVDGVSARLNVMMHRPLPEGDAYVKRVALVGKKSSAAMPW
EVSLALTVEVPVAKEPQAPAGTRCGLDVGWRKLDKDRMRV
AVLYNGGPNSEELVMPLRIHDRKLGEVSLERLARLNRCRD
ALLERTKAAVATMLGTEPSAWAQMRNGGLVRLMREDGAPP
EVIEVLEAWKQDNDRYLRLERLVEAHLRRHYEWRYGKWAK
DVATRYRTVRIRKMGQKEMWAVEKTKDYPALKASAERRKL
AAGGSLLSMVRHAVRKACGNLVEVEAAHTTDTCAACGSHF
EAGAGLMGRCEQGHVMDQDWNAAGNIYAGRAGATAQAAVG
(SEQ ID NO: 113)
>3300025507|Ga0208188_1002252_2|M
[aquatic-freshwater-peatland]
MSARTIEERKGKTSMQRERKRKETHDIRPHKYRAWFAEGD
GTRLPEPIFALAKRMQDCWTDIALHNQDAFEEWRMAHPLP
APPDGLAGEAFEDWRRKNWPRPPKPFYEANQAWAESRVRQ
ANLPGELGETILDRLSVTVNNMKKGGGPPKPHYRLDRFAF
HHRYTSGGLPVLGLRSQRSQRFHILLPPPNAYQPKGGMRN
PHELRRQRACPAWFCVDGVPVRLNVMMHRPLPEGDAYLKR
VALVGKKSSAALPWEVFLVLTVEVPLAKEPQAPAGTRCGL
DVGWRKLDKDRMRVAVLYNGGPNSEELVMPLRIHDRKLGE
VSLERLARLNRCRDALLERTKAAVATMLGTEPSAWAQMRN
GGLVRLMREDGAPPEVIEVLEAWKQDNDRYLRLERLVEAH
LRRHYEWRYGKWAKDVATRYRTVRIRKMGQKEMWAVEKTK
DYPALKASAERRKLAAGGSLLSMVRHAVRKACGNLVEVEA
AHTTDTCAACGSHFEAGAGLMGRCEQGHVMDQDWNAAGNI
YAGRAGATAQAAVG
(SEQ ID NO: 114)
>3300025507|Ga0208188_1002252_2|P
[aquatic-freshwater-peatland]
MQRERKRKETHDIRPHKYRAWFAEGDGTRLPEPIFALAKR
MQDCWTDIALHNQDAFEEWRMAHPLPAPPDGLAGEAFEDW
RRKNWPRPPKPFYEANQAWAESRVRQANLPGELGETILDR
LSVTVNNMKKGGGPPKPHYRLDRFAFHHRYTSGGLPVLGL
RSQRSQRFHILLPPPNAYQPKGGMRNPHELRRQRACPAWF
CVDGVPVRLNVMMHRPLPEGDAYLKRVALVGKKSSAALPW
EVFLVLTVEVPLAKEPQAPAGTRCGLDVGWRKLDKDRMRV
AVLYNGGPNSEELVMPLRIHDRKLGEVSLERLARLNRCRD
ALLERTKAAVATMLGTEPSAWAQMRNGGLVRLMREDGAPP
EVIEVLEAWKQDNDRYLRLERLVEAHLRRHYEWRYGKWAK
DVATRYRTVRIRKMGQKEMWAVEKTKDYPALKASAERRKL
AAGGSLLSMVRHAVRKACGNLVEVEAAHTTDTCAACGSHF
EAGAGLMGRCEQGHVMDQDWNAAGNIYAGRAGATAQAAVG
(SEQ ID NO: 115)
>PJQE01000204_1M
[biofilm metagenome]
MKRKERKRPYYPVTVFSFHLEPHSIPQQVWDTAKEMQALW
NLMTEAHKRILEQTAEMEKPQKVEPYRAFYKEVYNLTKAA
PLNAGCKWDVHDRFIATLKRFHKKQGGPPKFKKGLDRVRI
VRRFFDGGRPIEWLFSRTSDRQPVRLRQVAENRQGRLMRG
FFNVGDEQMDFEAVQHRAIPQGSFLKQIALTGRLIRAFND
AEHRGWQWSLNLTVEIPPQAMAASVGRVAALDVGWRVRGD
YLRIGLLTDTDGNLYELRLPFDLSNRSARRCEGGGYQMVS
SFKQMWEIESEQDEYLESVKERVRPRFDEMPEELRPDKGS
WHKVREGGLRRLLWSLVEANACPDVREILTRWRERNGAFE
KQIAGGRERMLKRREWMYRNIAAWIADRYDELVWEGDFNL
STVAADDTDDPALKAAQRYRQMAALYTLRQAIGQAMRKRG
RVIVESPAAYSTQTCSICKAHVPSGADLILRCESGHLMDQ
DVNAARIMLGERVGELRAMAGVSTSVDRSQVSGVVVPLNV
DAKVRG
(SEQ ID NO: 116)
>3300006845|Ga007542l_100006223_8|P
[plants-rhizosphere-populus rhizosphere]
MIDEKTAKRKSPIRRGRLNKDWPIKVYTYDCWPQEKPPQA
LWDTAHEMRRLWNDFTAIFRKILADDKKDEAGKPLLSKEE
RAILWAPINTKPLREIAKQRKEKLDAGCREAVVVRFLTTV
GNWRKNPSRVGPPRFKRADDMNAISIPLVYNDGKSAEWLN
GGEGTSSIRDTRNLKTEAPEEYLNNGHFCVGITRERLNLH
VAYGGRSGRNKYYLPAECRIKQVALCGRRDSAFSWSWSFQ
VRLEHPPDPARRPTGRVCGWDSGGWRLMDGYIRLGVIADN
AGHFYELMVPLVIGAASRRMRREKEYCHKHGWEYSKPMTF
DDAEALDASYGATLEACKTEVCKIFEEEKEDWPADAGKIM
SRIVKMRDMGLRRLRRKLEQIESEAKRTIDEWDAEAAKMN
ETIRAFEIHAYKAKRDAYRQIAAWLNAFDIIAWEGDLSLK
QMAEQVGKKKQKRKEAHKETGQWNERTPEELQFEASQKYR
QIAGQHGLREFVKQKHKSRLQNEKAAYSTQTCPECGGAIE
PGHKLLLVCENGHGRDQDVTAALHFLNKIEGVASIMVPPV
EIPAHLRPYLRVMDASEARLELAEKL
(SEQ ID NO: 117)
>3300006847|Ga0075431_100017297_1|M
[plants-rhizosphere-populus rhizosphere]
MIDEKTAKRKSPIRRGRLNKDWPIKVYTYDCWPQEKPPQA
LWDTAHEMRRLWNDFTAIFRKILADDKKDEAGKPLLSKEE
RAILWAPINTKPLREIAKQRKEKLDAGCREAVVVRFLTTV
GNWRKNPSRVGPPRFKRADDMNAISIPLVYNDGKSAEWLN
GGEGTSSIRDTRNLKTEAPEEYLNNGHFCVGITRERLNLH
VAYGGRSGRNKYYLPAECRIKQVALCGRRDSAFSWSWSFQ
VRLEHPPDPARRPTGRVCGWDSGGWRLMDGYIRLGVIADN
AGHFYELMVPLVIGAASRRMRREKEYCHKHGWEYSKPMTF
DDAEALDASYGATLEACKTEVCKIFEEEKEDWPADAGKIM
SRIVKMRDMGLRRLRRKLEQIESEAKRTIDEWDAEAAKMN
ETIRAFEIHAYKAKRDAYRQIAAWLNAFDIIAWEGDLSLK
QMAEQVGKKKQKRKEAHKETGQWNERTPEELQFEASQKYR
QIAGQHGLREFVKQKHKSRLQNEKAAYSTQTCPECGGAIE
PGHKLLLVCENGHGRDQDVTAALHFLNKIEGVASIMVPPV
EIPAHLRPYLRVMDASEARLELAEKL
(SEQ ID NO: 118)
>3300027909|Ga0209382_10008589_8|P
[plants-rhizosphere-populus rhizosphere]
MIDEKTAKRKSPIRRGRLNKDWPIKVYTYDCWPQEKPPQA
LWDTAHEMRRLWNDFTAIFRKILADDKKDEAGKPLLSKEE
RAILWAPINTKPLREIAKQRKEKLDAGCREAVVVRFLTTV
GNWRKNPSRVGPPRFKRADDMNAISIPLVYNDGKSAEWLN
GGEGTSSIRDTRNLKTEAPEEYLNNGHFCVGITRERLNLH
VAYGGRSGRNKYYLPAECRIKQVALCGRRDSAFSWSWSFQ
VRLEHPPDPARRPTGRVCGWDSGGWRLMDGYIRLGVIADN
AGHFYELMVPLVIGAASRRMRREKEYCHKHGWEYSKPMTF
DDAEALDASYGATLEACKTEVCKIFEEEKEDWPADAGKIM
SRIVKMRDMGLRRLRRKLEQIESEAKRTIDEWDAEAAKMN
ETIRAFEIHAYKAKRDAYRQIAAWLNAFDIIAWEGDLSLK
QMAEQVGKKKQKRKEAHKETGQWNERTPEELQFEASQKYR
QIAGQHGLREFVKQKHKSRLQNEKAAYSTQTCPECGGAIE
PGHKLLLVCENGHGRDQDVTAALHFLNKIEGVASIMVPPV
EIPAHLRPYLRVMDASEARLELAEKL
(SEQ ID NO: 119)
>ODAK010035847_2|M
[soil metagenome]
MAYKFRAYVTGTDASHGQMLPPAIYTVAKNMENCWSDIAN
HNEQEYGAWKAAHVGADGKLPINIKSKTPIKPPKEFYAAS
EAWAIERIEQAQLPDELGTTILDRLHTTYKMMKRGGGPPK
PKRRMDRFALHHRYTGGGMPVANLGGQRAERFRVLLPSGT
AYQPWGRVKNPRDRRRERTVKAWFRVGDQPIQLRVVMHRP
LSVEDCFVKRVYLTGEKPSVAMPWVYYLVILIELPKPIVK
NTNAATVGIDVGWRKLDDERLRVAVGYDGHSHPELVLPLT
FQARGLGEVSLDRISKVKTLRDNSLEATKDKLRTLLNPLP
PGFAQMRNGGLLRLLRLMQQNEPDSPVIGMLENWKTDNDR
YLRLERVLENKLMAHRDKMYEKWALVEIATKYGVVKIEKM
NQQEMWDAEANKKDPALRAAAERRKYASCGALLAYIRRTV
KRVGGEIVEVPAEHTTDICSECGALFEAGSEIIGRCTRGH
EKDQDWNAAENIYAYSSAPVAELLSA
(SEQ ID NO: 120)
>SRR6266511_1572288_18|M
[soil metagenome]
MMQDTLQLKQRKNLARRERLNKDWPIKVYTYACWPQGTIP
SALWDTAHEMRRLWNDFTAIFRDILGKDLKDELGKPLLSK
QERAILWAPINTKPLREIAKQRKDRLDAGAGEGVVVRFMT
TVGNWRKNPARYGPPRFQRADEMDTILIPLVYNDGKSAEW
LLSGNGTSAVRDTRQLKTAAPQEYLNNGHFCIGITREKLN
LHIAYGGRSGQKKHHLPAKCRIKQVALAGKRDSVFGWSWS
FQVRLEYPPEPARQSTGRVCGWDSAGWRKMDDYIRLGVIA
DNAGHFYELRVPLAIGAASKRVRRERKHCQKNGWEYSKPI
TFDDAQALHSRYGTALEACKANVHKIFEEEKETWPEDARK
IMGGIVRMRDSGLRRLRQKLAPIDSVAKQTIDDWDVEAAS
LNGTIRAFEKHVDNVKKGAYRQIAAWLNTFDRVVWEGDLN
LKQLAEAAGGKKEKRKKQYAETGKYGERTSEDRQLEASQR
YRQIAGLYMLGQFVFEKIAICECSHSTQQHFRQIGPCHCG
CESYQEARLIDGSTAYSTQTCPECGASIEAGGKLLLVCEN
GHKRDQDCATSLYFLNKIEGRASISAPPLKIPAHLKPYLR
VMDASEVRLELVDKQ
(SEQ ID NO: 121)
>SRR6266511_203987_6|P
[soil metagenome]
MNTKSNMRVKGETQETPLASIPPRSTAATSGSAPAPPGPG
SSIVKDNRKKTPRRERLHKDWPIKVLVYPCWPIGEPPVEL
WDTAHEMRRLWNAFASLFRDALEADVKDEAGKPSLSKEDR
AKVWAPINMNNLREVGKERKEKLDQACRESVVNRFLKTVN
NWRKNSRENGPPRFRRAAEMDTVSIPLEYNYGKSAEWLNK
GEGTAGVRYTLDIKKNAPRDGNGAPLLSEEDLLAYLNNGH
FSVGVSRARLDLHIAYGGRSGKKKYFLPPGCRIKAVSLCG
KRDSAHGWSWSFQVRLEHPPGSSRPLTGRVCGWDAVGWRL
MDGYIRIGVIADNAGHFYEVRVPLAIGELSRRVRREKAHC
EKQGWEYTKPTTWDDLRELDSRYSKALDACKNEVRKTYEE
EKDKWPPEARRRMGGFAKMRDSGLRRLRRKLEESDSAAKE
TIDNWDAEAAQLNKMIRAFEIHAAMAKRDAFRQIAAWLDA
FDRVAWSAEPGLKSMAEAAGKRKQRRKEKYLETGQWEERT
PEERVFENSQKFRQIVGLHNLRQFVKERHGVGCFCGDHLL
QHEDNQGGCLACDCQAFNPRLMNCDAPYSTQACPECGGAI
KRGHKLLLRCENGHERDQDVSQSLHLLGSIEGYTSIAAPP
LDIPPHLRPYLRLMDASEAQITECARHSFRRRP
(SEQ ID NO: 122)
>SRR6266511_239355_1|M
[soil metagenome]
MEDISKKPERRKNFARRERLNKDWPFKVYPYRCMLREKPP
QALWDTAREMRRLWNDFTETFHKILKEDKKDEDGKPLLSK
EQRATLWASINIKPLREIAKKRKDKLDIGCREFIVTNFIT
TVGNWRKNPGKFGPPRFQPASEIRSIYIPLVYYDGKSAEW
LHCGKGTAWVQDTLHIKKNASRDEKGRPILTEEEMEQYLN
NSHFCVGITREKLNLHVAYGGRSGKKKRYLPDKCRIKWVA
LAGRRDSAFGWSWSFQVRLEHPPDPERQVTGRVCGWDSGG
WRKMDGYIRLGVIADNAGHFYELMVPLAIGAASHRLRHER
EHCQKNGWEYNKPITFDDAEALQSRYGLALEACKTNLRKI
FEEEKEKWPDDARKIMGGIVRMRDDGLRRLRRKLDAIESA
AKQTIDDWNAEAAKLNETIRAFQRHADNAKKDAYRQITAW
LSAFDRIAWEGVLNLKWMAEQPGKKKQERKKTLAETGQGG
ERTAEDRQLEASQRYRHIVGQYRLREFVKQTHEARLQNEK
TAYSTRTCPECGAHINPGGDLQLVCDNGHKRDQDVTTSLY
LLSKIEGYASASGPPIEIPAHLSQYLRVMHASEVRLEIVE
KH
(SEQ ID NO: 123)
>SRR6266511_838544_1|M
[soil metagenome]
MEDISKKPERRKNPARRERLNKDWPIKVHNYRCSLNEKPP
QTLWDTAHEMRRLWNDLTAVFRKILAEDKKDEDGKPLLSK
EERANLWAPINIKPLREIAKQRKDKLDIGCREYVVTHFIT
TVNNWRRNPRRFGPPRFQNAADMDSVHIPLVYTDGKSADW
LTGGNGTAWVRDTLHIKKNALRDKDGRPILSENELEEYLN
NGHFCVGITREKLSLHIAYGGRSGRKRYHLPDKCRIKQVA
LCGRRNSAFGWSWSFQVRLEHPPDPERQVTGRVCGWDSVG
WRKMDGYIRLGVIADNAGHFYELMVPLAIGAASHRLRHER
EHCQKNGWEYNKPITFDDAEALQSRYGLALEACKTNLRKI
FEEEKEKWPDDARKIMGGIVRMRDDGLRRLRRNIDAIESA
AKQTIDDWDAEAAKLNETIRAFQRHADNAKKDAYRQITAW
LSAFDKIAWEGDRSLKGMSEQGGKEKQKRKKMHEETGQWG
ERTAEERQLEASQRNRQIVGQHRLREFVKRMHADRLQNEK
TAHSTRICPECGAHINPGGDLQLVCDNGHKRDQDVTTSLY
LLSKIEGCASASGPPIEIPAHLSPYLRVMTASEVALEIVE
(SEQ ID NO: 124)
>3300014502|Ga0182021_10233972_2|M
[terrestrial-soil-fen]
MRPKKNADTIYQTYKFWIKPSDPLPQLLWDKAKAMNAAWT
SLVLMRQETLETWMAQRDTLTADQKRAFWNTFNLAVREKI
EECELDWETSGVLHDRFLVAHQRALKDKADLHGRTRLQRI
LLVHRYTGGGIPIEKLLSTRAWRFALDAFPTEDVYATNTR
QARRGRQTQGRFGLDNETAVEFSIILHRPLPPAAIVKRVA
LSGRRQKPPAHEWDWALVVSVEVPNPSRTAAGRVIGIDLG
WRKIDDYLRIGYAADDTDQQIELRLPLDFSTQKARSAGYP
CNHAELRALEGRIAVAVDATK
AAIGELIAVPSLALMRQGGLVRLQRTLSEKPDLSEAEVEA
LRILGAWRKQNDRLQKIYNFSTARFAARRRWLYQNLAAWL
CRNYDVIAIEGDLDVKGLAEEPDPDPALKAAQRYRQIAAP
GELREIIRWTAQREGVIVKDCNTAYSTTTCFTCGEQAEAG
PDLILECPAGHRFDQDANAAANLLSQILPSTEVQDGLRKN
QRDFLRIPPELQMVAWVHRD
(SEQ ID NO: 125)
>3300005529|Ga0070741_10001368_72|P
[terrestrial-soil-surface soil]
MSAIIEVQKPQHRKERANPDWPVKVYSYWIEPIGDIPEWF
WLFHDHMQLLWNDMVIAHDAFIDEREFSEESDGKWDTDRK
RLEFSGLREKLKNVAKSKKGILPSSCYYEVRDRFLITMGR
YWNPDSTLKRRRNETKNFDLGRPGMKFGRNKVLIPHDLNA
ANISTSILFSNKKPLTILQRTKQQGPTRGIFETLGYNFNF
RINLHRPIPNGNIKRIAIVGEMVKPFGWQWRLNLTIEEPP
VRPQRKNGRVAAIDLGWRLMDDCIRIGVLVDNSDNAIELS
IPLDFANNSLRRQREHFMDVTDACLPIHSIPDIWKAQQES
DLILEVCKNRLTALIPELLPNKVAWDKARHKSLIKLLNTL
REDHPESSAIAVIEQWRTTNWVLHRRWRAAYERFMRWRRE
IYRVLAAEIASTYDEIVLEDRLNLAEMSRDEQAPPAIKAS
QKYRHWTSLYLFKECLKYAMDKQQKLIIAGKTAYSTATCS
TCDGKINTDASLYLTCANGHTLDQDLNAARNLLKSYPECE
SLPGLESPIRHSQLSKCVRTLSLLKSL
(SEQ ID NO: 126)
>3300010046|Ga0126384_10047357_3|M
[terrestrial-soil-tropical forest soil]
MMQDTLLLKQRKNLARRERLNKDWPIKVYTYACWPQGTIP
SALWDTAHEMRRLWNDFTAIFRDILSKDLKDELGKPLLSK
QERAILWAPINTKPLREIAKQRKDELDAGTREGVVVRFMT
TVGNWRKNPARYGPPRFQRADEMDTILIPLVYNDGKSAEW
LLSGNGTSAVRDTRQLKTAAPQEYLNNGHFCIGITREKLN
LHIAYGGRSGQKKHHLPAKCRIKQVALAGKRDSVFGWSWS
FQVRLEYPPEPARQSTGRVCGWDSAGWRKMDDYIRLGVIA
DNAGHFYELRVPLAIGAASKRVRRERKHCQKNGWEYSKPI
TFDDAQALHSRYGTALEACKANVHKIFEEEKETWPEDARK
IMGGIVRMRDSGLRRLRQKLAPIDSVAKQTIDDWDVEAAS
LNETIRAFEKHVDNVKKGAYRQIAAWLNTFDRVVWEGDLN
LKQLAEAAGGKKEKRKKQYAETGKYGERTPEDRQLEASQR
YRQIAGLYMLRQFVFEKIAICECSHSTQQHFRQIGPCHCG
CESYQEARLIDGSTAYSTQTCPECGASIEAGGKLLLVCEN
GHKRDQDCATSLYFLNKMEGRASISAPPLKIPAHLKPYLR
VMDASEVRLELVDKQ
(SEQ ID NO: 127)
>3300010359|Ga0126376_10030051_2|M
[terrestrial-soil-tropical forest soil]
MMQDTLLLKQRKNLARRERLNKDWPIKVYTYACWPQGTIP
SALWDTAHEMRRLWNDFTAIFRDILSKDLKDELGKPLLSK
QERAILWAPINTKPLREIAKQRKDELDAGTREGVVVRFMT
TVGNWRKNPARYGPPRFQRADEMDTILIPLVYNDGKSAEW
LLSGNGTSAVRDTRQLKTAAPQEYLNNGHFCIGITREKLN
LHIAYGGRSGQKKHHLPAKCRIKQVALAGKRDSVFGWSWS
FQVRLEYPPEPARQSTGRVCGWDSAGWRKMDDYIRLGVIA
DNAGHFYELRVPLAIGAASKRVRRERKHCQKNGWEYSKPI
TFDDAQALHSRYGTALEACKANVHKIFEEEKETWPEDARK
IMGGIVRMRDSGLRRLRQKLAPIDSVAKQTIDDWDVEAAS
LNETIRAFEKHVDNVKKGAYRQIAAWLNTFDRVVWEGDLN
LKQLAEAAGGKKEKRKKQYAETGKYGERTPEDRQLEASQR
YRQIAGLYMLRQFVFEKIAICECSHSTQQHFRQIGPCHCG
CESYQEARLIDGSTAYSTQTCPECGASIEAGGKLLLVCEN
GHKRDQDCATSLYFLNKIEGRASISAPPHKIPAHLKPYLR
VMDASEVRLELVDKQ
(SEQ ID NO: 128)
>3300010362|Ga0126377_10111069_2|M
[terrestrial-soil-tropical forest soil]
MMQDTLLLKQRKNLARRERLNKDWPIKVYTYACWPQGTIP
SALWDTAHEMRRLWNDFTAIFRDILSKDLKDELGKPLLSK
RERAILWAPINTKPLREIAKQRKDELDAGAREGVVVRFMT
TVGNWRKNPARYGPPRFQRADEMDTILIPLVYNDGKSAEW
LLSGNGTSAVHDTRQLKTAAPQEYLNNGHFCIGITREKLN
LHIAYGGRSGQKKHHLPAKCRIKQVALAGKRDSVFGWSWS
FQVRLEYPPEPARQSTGRVCGWDSAGWRKMDDYIRLGVIA
DNAGHFYELRVPLAIGAASKRVRRERKHCQKNGWEYSKPI
TFDDAQALHSRYGTALEACKANVHKIFEEEKETWPEDARK
IMGGIVRMRDSGLRRLRQKLAPIDSVAKQTIDDWDVEAAS
LNETIRAFEKHVDNVKKGAYRQIAAWLNTFDRVVWEGDLN
LKQLAEAAGRKKEKRKKQYAETGKYGERTPEDRQLEASQR
YRQIAGLYMLRQFVFEKIAICECSHSTQQHFRQIGPCHCG
CESYQEARLIDGSTAYSTQTCPECGASIEAGGKLLLVCEN
GHKRDQDCATSLYFLNKIEGRASISAPPLKIPAHLKPYLR
VMDASEVRLELVDKQ
(SEQ ID NO: 129)
>3300012204|Ga0137374_10002290_4|M
[terrestrial-soil-vadose zone soil]
MNTKSNMRVKGETQETPLASIPPRSTAATSGSAPAPPGPG
SSIVKDNRKKTPRRERLHKDWPIKVLVYPCWPIGEPPVEL
WDTAHEMRRLWNAFASLFRDALEADVKDEAGKPSLSKEDR
AKVWAPINMNNLREVGKERKEKLDQACRESVVNRFLKTVN
NWRKNSRENGPPRFRRAAEMDTVSIPLEYNYGKSAEWLNK
GEGTAGVRYTLDIKKNAPRDGNGAPLLSEEDLLAYLNNGH
FSVGVSRARLDLHIAYGGRSGKKKYFLPPGCRIKAVSLCG
KRDSAHGWSWSFQVRLEHPPGSSRPLTGRVCGWDAVGWRL
MDGYIRIGVIADNAGHFYEVRVPLAIGELSRRVRREKAHC
EKQGWEYTKPTTWDDLRELDSRYSKALDACKNEVRKTYEE
EKDKWPPEARRRMGGFAKMRDSGLRRLRRKLEESDSAAKE
TIDNWDAEAAQLNKMIRAFEIHAAMAKRDAFRQIAAWLDA
FDRVAWSAEPGLKSMAEAAGKRKQRRKEKYLETGQWEERT
PEERVFENSQKFRQIVGLHNLRQFVKERHGVGCFCGDHLL
QHEDNQGGCLACDCQAFNPRLMNCDAPYSTQACPECGGAI
KRGHKLLLRCENGHERDQDVSQSLHLLGSIEGYTSIAAPP
LDIPPHLRPYLRLMDASEAQITECARHSFRRRP
(SEQ ID NO: 130)
>3300012204|Ga0137374_100098796|P
[terrestrial-soil-vadose zone soil]
MMQDTLQLKQRKNLARRERLNKDWPIKVYTYACWPQGTIP
SALWDTAHEMRRLWNDFTAIFRDILGKDLKDELGKPLLSK
QERAILWAPINTKPLREIAKQRKDRLDAGAGEGVVVRFMT
TVGNWRKNPARYGPPRFQRADEMDTILIPLVYNDGKSAEW
LLSGNGTSAVRDTRQLKTAAPQEYLNNGHFCIGITREKLN
LHIAYGGRSGQKKHHLPAKCRIKQVALAGKRDSVFGWSWS
FQVRLEYPPEPARQSTGRVCGWDSAGWRKMDDYIRLGVIA
DNAGHFYELRVPLAIGAASKRVRRERKHCQKNGWEYSKPI
TFDDAQALHSRYGTALEACKANVHKIFEEEKETWPEDARK
IMGGIVRMRDSGLRRLRQKLAPIDSVAKQTIDDWDVEAAS
LNGTIRAFEKHVDNVKKGAYRQIAAWLNTFDRVVWEGDLN
LKQLAEAAGGKKEKRKKQYAETGKYGERTSEDRQLEASQR
YRQIAGLYMLGQFVFEKIAICECSHSTQQHFRQIGPCHCG
CESYQEARLIDGSTAYSTQTCPECGASIEAGGKLLLVCEN
GHKRDQDCATSLYFLNKIEGRASISAPPLKIPAHLKPYLR
VMDASEVRLELVDKQ
(SEQ ID NO: 131)
>3300012350|Ga0137372_10022207_3|M
[terrestrial-soil-vadose zone soil]
MMQDTLQLKQRKNLARRERLNKDWPIKVYTYACWPQGTIP
SALWDTAHEMRRLWNDFTAIFRDILGKDLKDELGKPLLSK
QERAILWAPINTKPLREIAKQRKDRLDAGAGEGVVVRFMT
TVGNWRKNPARYGPPRFQRADEMDTILIPLVYNDGKSAEW
LLSGNGTSAVRDTRQLKTAAPQEYLNNGHFCIGITREKLN
LHIAYGGRSGQKKHHLPAKCRIKQVALAGKRDSVFGWSWS
FQVRLEYPPEPARQSTGRVCGWDSAGWRKMDDYIRLGVIA
DNAGHFYELRVPLAIGAASKRVRRERKHCQKNGWEYSKPI
TFDDAQALHSRYGTALEACKANVHKIFEEEKETWPEDARK
IMGGIVRMRDSGLRRLRQKLAPIDSVAKQTIDDWDVEAAS
LNGTIRAFEKHVDNVKKGAYRQIAAWLNTFDRVVWEGDLN
LKQLAEAAGGKKEKRKKQYAETGKYGERTSEDRQLEASQR
YRQIAGLYMLGQFVFEKIAICECSHSTQQHFRQIGPCHCG
CESYQEARLIDGSTAYSTQTCPECGASIEAGGKLLLVCEN
GHKRDQDCATSLYFLNKIEGRASISAPPLKIPAHLKPYLR
VMDASEVRLELVDKQ
(SEQ ID NO: 132)
>3300012350|Ga0137372_10022207_4|P
[terrestrial-soil-vadose zone soil]
MQDTLQLKQRKNLARRERLNKDWPIKVYTYACWPQGTIPS
ALWDTAHEMRRLWNDFTAIFRDILGKDLKDELGKPLLSKQ
ERAILWAPINTKPLREIAKQRKDRLDAGAGEGVVVRFMTT
VGNWRKNPARYGPPRFQRADEMDTILIPLVYNDGKSAEWL
LSGNGTSAVRDTRQLKTAAPQEYLNNGHFCIGITREKLNL
HIAYGGRSGQKKHHLPAKCRIKQVALAGKRDSVFGWSWSF
QVRLEYPPEPARQSTGRVCGWDSAGWRKMDDYIRLGVIAD
NAGHFYELRVPLAIGAASKRVRRERKHCQKNGWEYSKPIT
FDDAQALHSRYGTALEACKANVHKIFEEEKETWPEDARKI
MGGIVRMRDSGLRRLRQKLAPIDSVAKQTIDDWDVEAASL
NGTIRAFEKHVDNVKKGAYRQIAAWLNTFDRVVWEGDLNL
KQLAEAAGGKKEKRKKQYAETGKYGERTSEDRQLEASQRY
RQIAGLYMLGQFVFEKIAICECSHSTQQHFRQIGPCHCGC
ESYQEARLIDGSTAYSTQTCPECGASIEAGGKLLLVCENG
HKRDQDCATSLYFLNKIEGRASISAPPLKIPAHLKPYLRV
MDASEVRLELVDKQ
(SEQ ID NO: 133)
>3300012353|Ga0137367_10000906_4|M
[terrestrial-soil-vadose zone soil]
MNTKSNMRVKGETQETPLASIPPRSTAATSGSAPAPPGPG
SSIVKDNRKKTPRRERLHKDWPIKVLVYPCWPIGEPPVEL
WDTAHEMRRLWNAFASLFRDALEADVKDEAGKPSLSKEDR
AKVWAPINMNNLREVGKERKEKLDQACRESVVNRFLKTVN
NWRKNSRENGPPRFRRAAEMDTVSIPLEYNYGKSAEWLNK
GEGTAGVRYTLDIKKNAPRDGNGAPLLSEEDLLAYLNNGH
FSVGVSRARLDLHIAYGGRSGKKKYFLPPGCRIKAVSLCG
KRDSAHGWSWSFQVRLEHPPGSSRPLTGRVCGWDAVGWRL
MDGYIRIGVIADNAGHFYEVRVPLAIGELSRRVRREKAHC
EKQGWEYTKPTTWDDLRELDSRYSKALDACKNEVRKTYEE
EKDKWPPEARRRMGGFAKMRDSGLRRLRRKLEESDSAAKE
TIDNWDAEAAQLNKMIRAFEIHAAMAKRDAFRQIAAWLDA
FDRVAWSAEPGLKSMAEAAGKRKQRRKEKYLETGQWEERT
PEERVFENSQKFRQIVGLHNLRQFVKERHGVGCFCGDHLL
QHEDNQGGCLACDCQAFNPRLMNCDAPYSTQACPECGGAI
KRGHKLLLRCENGHERDQDVSQSLHLLGSIEGYTSIAAPP
LDIPPHLRPYLRLMDASEAQITECARHSFRRRP
(SEQ ID NO: 134)
>3300012353|Ga0137367_10004593_5|M
[terrestrial-soil-vadose zone soil]
MMQDTLQLKQRKNLARRERLNKDWPIKVYTYACWPQGTIP
SALWDTAHEMRRLWNDFTAIFRDILGKDLKDELGKPLLSK
QERAILWAPINTKPLREIAKQRKDRLDAGAGEGVVVRFMT
TVGNWRKNPARYGPPRFQRADEMDTILIPLVYNDGKSAEW
LLSGNGTSAVRDTRQLKTAAPQEYLNNGHFCIGITREKLN
LHIAYGGRSGQKKHHLPAKCRIKQVALAGKRDSVFGWSWS
FQVRLEYPPEPARQSTGRVCGWDSAGWRKMDDYIRLGVIA
DNAGHFYELRVPLAIGAASKRVRRERKHCQKNGWEYSKPI
TFDDAQALHSRYGTALEACKANVHKIFEEEKETWPEDARK
IMGGIVRMRDSGLRRLRQKLAPIDSVAKQTIDDWDVEAAS
LNGTIRAFEKHVDNVKKGAYRQIAAWLNTFDRVVWEGDLN
LKQLAEAAGGKKEKRKKQYAETGKYGERTSEDRQLEASQR
YRQIAGLYMLGQFVFEKIAICECSHSTQQHFRQIGPCHCG
CESYQEARLIDGSTAYSTQTCPECGASIEAGGKLLLVCEN
GHKRDQDCATSLYFLNKIEGRASISAPPLKIPAHLKPYLR
VMDASEVRLELVDKQ
(SEQ ID NO: 135)
>3300012355|Ga0137369_10001944_2|P
[terrestrial-soil-vadose zone soil]
MNTKSNMRVKGETQETPLASIPPRSTAATSGSAPAPPGPG
SSIVKDNRKKTPRRERLHKDWPIKVLVYPCWPIGEPPVEL
WDTAHEMRRLWNAFASLFRDALEADVKDEAGKPSLSKEDR
AKVWAPINMNNLREVGKGWKEKLDQACRESVVNRFLKTVN
NWRKNSRENGPPRFRRAAEMDTVSIPLEYNYGKSAEWLNK
GEGTAGVRYTLDIKKNAPRDGNGAPLLSEEDLLAYLNNGH
FSVGVSRARLDLHIAYGGRSGKKKYFLPPGCRIKAVSLCG
KRDSAHGWSWSFQVRLEHPPGSSRPLTGRVCGWDAVGWRL
MDGYIRIGVIADNAGHFYEVRVPLAIGELSRRVRREKAHC
EKQGWEYTKPTTWDDLRELDSRYSKALDACKNEVRKTYEE
EKDKWPPEARRRMGGFAKMRDSGLRRLRRKLEESDSAAKE
TIDNWDAEAAQLNKMIRAFEIHAAMAKRAAFRQIAAWLDA
FDRVAWSAEPGLKSMAEAAGKRKQRRKEKYLETGQWEERT
PEERVFENSQKFRQIVGLHNLRQFVKERHGVGCFCGDHLL
QHEDNQGGCLACDCQAFNPRLMNCDAPYSTQACPECGGAI
KRGHKLLLRCENGHERDQDVSQSLHLLGSIEGYTSIAAPP
LDIPPHLRPYLRLMDASEAQITECARHSFRRRP
(SEQ ID NO: 136)
>3300012355|Ga0137369_10007378_6|M
[terrestrial-soil-vadose zone soil]
MMQDTLQLKQRKNLARRERLNKDWPIKVYTYACWPQGTIP
SALWDTAHEMRRLWNDFTAIFRDILGKDLKDELGKPLLSK
QERAILWAPINTKPLREIAKQRKDRLDAGAGEGVVVRFMT
TVGNWRKNPARYGPPRFQRADEMDTILIPLVYNDGKSAEW
LLSGNGTSAVRDTRQLKTAAPQEYLNNGHFCIGITREKLN
LHIAYGGRSGQKKHHLPAKCRIKQVALAGKRDSVFGWSWS
FQVRLEYPPEPARQSTGRVCGWDSAGWRKMDDYIRLGVIA
DNAGHFYELRVPLAIGAASKRVRRERKHCQKNGWEYSKPI
TFDDAQALHSRYGTALEACKANVHKIFEEEKETWPEDARK
IMGGIVRMRDSGLRRLRQKLAPIDSVAKQTIDDWDVEAAS
LNGTIRAFEKHVDNVKKGAYRQIAAWLNTFDRVVWEGDLN
LKQLAEAAGGKKEKRKKQYAETGKYGERTSEDRQLEASQR
YRQIAGLYMLGQFVFEKIAICECSHSTQQHFRQIGPCHCG
CESYQEARLIDGSTAYSTQTCPECGASIEAGGKLLLVCEN
GHKRDQDCATSLYFLNKIEGRASISAPPLKIPAHLKPYLR
VMDASEVRLELVDKQ
(SEQ ID NO: 137)
>3300012355|Ga0137369_10043960_1|M
[terrestrial-soil-vadose zone soil]
MEDISKKPERRKNFARRERLNKDWPFKVYPYRCMLREKPP
QALWDTAREMRRLWNDFTETFHKILKEDKKDEEGRPLLSK
EQRATLWASINIKPLREIAKKRKDKLDIGCREFIVTNFIT
TVGNWRKNPGKFGPPRFQPASEIRSIYIPLVYYDGKSAEW
LHCGKGTAWVQDTLHIKKNASRDEKGRPILTEEEMEQYLN
NSHFCVGITREKLNLHVAYGGRSGKKKRYLPDKCRIKWVA
LAGRRDSAFGWSWSFQVRLEHPPDPERQVTGRVCGWDSGG
WRKMDGYIRLGVIADNAGHFYELMVPLAIGAASHRLRHER
EHCQKNGWEYNKPITFDDAEALQSRYGLALEACKTNLRKI
FEEEKEKWPDDARKIMGGIVRMRDDGLRRLRRKLDAIESA
AKQTIDDWNAEAAKLNETIRAFQRHADNAKKDAYRQITAW
LSAFDRIAWEGDLNLKWMAEQPGKKKQERKKTLAETGQGG
ERTAEDRQLEASQRYRHIVGQYRLREFVKQTHEARLQNEK
TAHSTRTCPECGAHINPGGDLQLVCDNGHKRDQDVTTSLY
LLSKIEGCARVSAPPIEIPAHLSQYLRVMHASEVRLEIVE
KH
(SEQ ID NO: 138)
>3300012358|Ga0137368_10001884_4|M
[terrestrial-soil-vadose zone soil]
MNTKSNMRVKGETQETPLASIPPRSTAATSGSAPAPPGPG
SSIVKDNRKKTPRRERLHKDWPIKVLVYPCWPIGEPPVEL
WDTAHEMRRLWNAFASLFRDALEADVKDEAGKPSLSKEDR
AKVWAPINMNNLREVGKERKEKLDQACRESVVNRFLKTVN
NWRKNSRENGPPRFRRAAEMDTVSIPLEYNYGKSAEWLNK
GEGTAGVRYTLDIKKNAPRDGNGAPLLSEEDLLAYLNNGH
FSVGVSRARLDLHIAYGGRSGKKKYFLPPGCRIKAVSLCG
KRDSAHGWSWSFQVRLEHPPGSSRPLTGRVCGWDAVGWRL
MDGYIRIGVIADNAGHFYEVRVPLAIGELSRRVRREKAHC
EKQGWEYTKPTTWDDLRELDSRYSKALDACKNEVRKTYEE
EKDKWPPEARRRMGGFAKMRDSGLRRLRRKLEESDSAAKE
TIDNWDAEAAQLNKMIRAFEIHAAMAKRDAFRQIAAWLDA
FDRVAWSAEPGLKSMAEAAGKRKQRRKEKYLETGQWEERT
PEERVFENSQKFRQIVGLHNLRQFVKERHGVGCFCGDHLL
QHEDNQGGCLACDCQAFNPRLMNCDAPYSTQACPECGGAI
KRGHKLLLRCENGHERDQDVSQSLHLLGSIEGYTSIAAPP
LDIPPHLRPYLRLMDASEAQITECARHSFRRRP
(SEQ ID NO: 139)
>3300012358|Ga0137368_10007571_6|P
[terrestrial-soil-vadose zone soil]
MMQDTLQLKQRKNLARRERLNKDWPIKVYTYACWPQGTIP
SALWDTAHEMRRLWNDFTAIFRDILGKDLKDELGKPLLSK
QERAILWAPINTKPLREIAKQRKDRLDAGAGEGVVVRFMT
TVGNWRKNPARYGPPRFQRADEMDTILIPLVYNDGKSAEW
LLSGNGTSAVRDTRQLKTAAPQEYLNNGHFCIGITREKLN
LHIAYGGRSGQKKHHLPAKCRIKQVALAGKRDSVFGWSWS
FQVRLEYPPEPARQSTGRVCGWDSAGWRKMDDYIRLGVIA
DNAGHFYELRVPLAIGAASKRVRRERKHCQKNGWEYSKPI
TFDDAQALHSRYGTALEACKANVHKIFEEEKETWPEDARK
IMGGIVRMRDSGLRRLRQKLAPIDSVAKQTIDDWDVEAAS
LNGTIRAFEKHVDNVKKGAYRQIAAWLNTFDRVVWEGDLN
LKQLAEAAGGKKEKRKKQYAETGKYGERTSEDRQLEASQR
YRQIAGLYMLGQFVFEKIAICECSHSTQQHFRQIGPCHCG
CESYQEARLIDGSTAYSTQTCPECGASIEAGGKLLLVCEN
GHKRDQDCATSLYFLNKIEGRASISAPPLKIPAHLKPYLR
VMDASEVRLELVDKQ
(SEQ ID NO: 140)
>3300012360|Ga0137375_10064112_1|P
[terrestrial-soil-vadose zone soil]
MNTKSNMRVKGETQETPLASIPPRSTAATSGSAPAPPGPG
SSIVKDNRKKTPRRERLHKDWPIKVLVYPCWPIGEPPVEL
WDTAHEMRRLWNAFVSLFRDALEADVKDEAGKPSLSKEDR
AKVWAPINMNNLREVGKERKEKLDQACRESVVNRFLKTVN
NWRKNSRENGPPRFRRAAEMDTVSIPLEYNYGKSAEWLNK
GEGTAGVRYTLDIKKNAPRDGNGAPLLSEEDLLAYLNNGH
FSVGVSRARLDLHIAYGGRSGKKKYFLPPGCRIKAVSLCG
KRDSAHGWSWSFQVRLEHPPGSSRPLTGRVCGWDAVGWRL
MDGYIRIGVIADNAGHFYEVRVPLAIGELSRRVRREKAHC
EKQGWEYTKPTTWDDLRELDSRYSKALDACKNEVRKTYEE
EKDKWPPEARRRMGGFAKMRDSGLRRLRRKLEESDSAAKE
TIDNWDAEAAQLNKMIRAFEIHAAMAKRDAFRQIAAWLDA
FDRVAWSAEPGLKSMAEAAGKRKQRRKEKYLETGQWEERT
PEERVFENSQKFRQIVGLHNLRQFVKERHGVGCFCGDHLL
QHEDNQGGCLACDCQAFNPRLMNCDAPYSTQACPECGGAI
KRGHKLLLRCENGHERDQDVSQSLHLLGSIEGYTSIAAPP
LDIPPHLRPYLRLMDASEAQITECARHSFRRRP
(SEQ ID NO: 141)
>3300012532|Ga0137373_10033017_1|P
[terrestrial-soil-vadose zone soil]
(SEQ ID NO: 142)
MNTKSNMRVKGETQETPLASIPPRSTAATSGSAPAPPGPG
SSIVKDNRKKTPRRERLHKDWPIKVLVYPCWPIGEPPVEL
WDTAHEMRRLWNAFASLFRDALEADVKDEAGKPSLSKEDR
AKVWAPINMNNLREVGKERKEKLDQACRESVVNRFLKTVN
NWRKNSRENGPPRFRRAAEMDTVSIPLEYNYGKSAEWLNK
GEGTAGVRYTLDIKKNAPRDGNGAPLLSEEDLLAYLNNGH
FSVGVSRARLDLHIAYGGRSGKKKYFLPPGCRIKAVSLCG
KRDSAHGWSWSFQVRLEHPPGSSRPLTGRVCGWDAVGWRL
MDGYIRIGVIADNAGHFYEVRVPLAIGELSRRVRREKAHC
EKQGWEYTKPTTWDDLRELDSRYSKALDACKNEVRKTYEE
EKDKWPPEARRRMGGFAKMRDSGLRRLRRKLEESDSAAKE
TIDNWDAEAAQLNKMIRAFEIHAAMAKRDAFRQIAAWLDA
FDRVAWSAEPGLKSMAEAAGKRKQRRKEKYLETGOWEERT
PEERVFENSQKFRQIVGLYNLRQFVKERHGVGCFCGDHLL
QHEDNQGGCLACDCQAFNPRLMNCDAPYSTQACPECGGAI
KRGHKLLLRCENGHERDQDVSQSLHLLGSIEGYTSIAAPP
LDIPPHLRPYLRLMDASEAQITECARHSFRRRP
>3300012944|Ga0137410_10000075_50|P
[terrestrial-soil-vadose zone soil]
MTRKLNNPDMPTLAYKYDVRIIGDLPQEIWDTGKAMNALY
SDLAERHEAFCGAFKDASKEMRKEQFAKLTKNGKGGILYE
RAKASKDALNFRYYYTVHEQFRKSQQRFAKRQGGAPKPKR
CLERMLFPMEFGSFSEPTTWIHSNSENRAYVREAQGPTRG
HFVIHTPYDEITIPFEIVMDRPLPDGALIKGIALSGFHER
PFEWKWSLVFSLQVPPHPKAPSVGRVAGLDLGWRDMGDCI
RIGMLADSAGDFRELRLPYDLSRNQDRKFIKRLESQGVVD
RPMLRDIRLIRDAQRKMDDHLEACKIDLAGVDRSVWPDEA
RASMAGWKMRAGGLQRIRRTLFEAGISYEFLEDWHFWHDT
NLRRYRAAQIDWIAARDYIYRCIAAWIADNYDTVAWEGDL
GLKRMAEAAGKRKKARKEEHEETGEWQERTVDDRISEASQ
KRRQWASLHTLRGYIAEAMKKRGRDLQGHPAAYSTQTCDE
CGQHIAPGHELIRECAERHVEDQDATAALYYLRIVQDYLR
AVTGFSASVNHSQLLKAIKPISPMNAA
>3300015245|Ga0137409_10000164_50|P
[terrestrial-soil-vadose zone soil]
(SEQ ID NO: 144)
MTRKLNNPDMPTLAYKYDVRIIGDLPQEIWDTGKAMNALY
SDLAERHEAFCGAFKDASKEMRKEQFAKLTKNGKGGILYE
RAKASKDALNFRYYYTVHEQFRKSQQRFAKRQGGAPKPKR
CLERMLFPMEFGSFSEPTTWIHSNSENRAYVREAQGPTRG
HFVIHTPYDEITIPFEIVMDRPLPDGALIKGIALSGFHER
PFEWKWSLVFSLQVPPHPKAPSVGRVAGLDLGWRDMGDCI
RIGMLADSAGDFRELRLPYDLSRNQDRKFIKRLESQGVVD
RPMLRDIRLIRDAQRKMDDHLEACKIDLAGVDRSVWPDEA
RASMAGWKMRAGGLQRIRRTLFEAGISYEFLEDWHFWHDT
NLRRYRAAQIDWIAARDYIYRCIAAWIADNYDTVAWEGDL
GLKRMAEAAGKRKKARKEEHEETGEWQERTVDDRISEASQ
KRRQWASLHTLRGYIAEAMKKRGRDLQGHPAAYSTQTCDE
CGQHIAPGHELIRECAERHVEDQDATAALYYLRIVQDYLR
AVTGFSASVNHSQLLKAIKPISPMNAA
(SEQ ID NO: 143)
>SRR6837571_912213_1|M
[wastewater metagenome]
MRTTKTPDYSNKNLSFWCEPVGEMPSVVFEKGRQMNRLWN
LLVECHTTFLAKHDGKKGGERTEAYKTEWQPLLKRIYNNE
AKSFGLNSDETNFVTDGFKNAIRAGYDQKRPGAGMPTFKA
RLRSIHIPFCDRNGGRAPAWFFEKPDRRIHLRPILLPDAA
KRVIDRGPARGHFTVDGQAISLRANLSQSIPPGALVKRVS
LVGKLERPFGWQWKLMFSIAYPPPPPAQSDAACVGVDLGY
RRFEDRIRFGMIFDGSRFHELALPLDLTNRRAAKAGKRWD
IREIWELESQIGCGVEACKASLKQLPKTDWPEEARGAMQG
IAKMRERGLLKVRRLLRDAEITVPELETWWDDYQRLFRKS
RHLELQIVATRTHLYRNLALSLARSCAAIAWEGGLSLRDL
AESAGKKKKQRKEDIAEGVSAERSPEDRIEEAAQKWRAYV
CLSDFRRFLKEAVEKTTAALIDRPAAGTTNTCEECGAPVD
TGPDLVLTCANGHRRDQDKGSAKMLFEEIDEGYRQQSAPL
SLDLFTDQAVRAIRTLNREMV
(SEQ ID NO: 145)

TABLE 11
Nucleotide sequences of Representative CLUST.099129
Direct Repeats and Spacer Lengths

| | | Spacer |
|---|---|---|
| Effector Accession | Direct Repeat Nucleotide Sequence | Length(s) |
| SRR6837557_1470862_2\|M (SEQ ID | AGTCGCGAATAACTGTTCAGCGGAGAAGCCGCTG | 32-34 |
| NO: 101) | AAAC (SEQ ID NO: 146) | |
| | GTTTCAGCGGCTTCTCCGCTGAACAGTTATTCGC | |
| | GACT (SEQ ID NO: 200) | |
| 3300012971\|Ga0126369_10127246_ | GTGATTGCAGACTGGTCGTGCGAATGCGCACGGC | 34-36 |
| UM (SEQ ID NO: 102) | AC (SEQ ID NO: 147) | |
| | GTGCCGTGCGCATTCGCACGACCAGTCTGCAATC | |
| | AC (SEQ ID NO: 201) | |
| 3300005764\|Ga0066903_100343966 | AGTAATTGAAAGTTGGTCGTGCGAATCCGCACGG | 32-34 |
| _1\|M (SEQ ID NO: 103) | CAC (SEQ ID NO: 148) | |
| | GTGCCGTGCGGATTCGCACGACCAACTTTCAATT | |
| | ACT (SEQ ID NO: 202) | |
| PMDR01000701_10\|P (SEQ ID NO: | GTTGCAGTGGTTGTCCATCGGGATTGAGCGATGG | 36-52 |
| 104) | AAC (SEQ ID NO: 149) | |
| | GTTCCATCGCTCAATCCCGATGGACAACCACTGC | |
| | AAC (SEQ ID NO: 203) | |
| 3300014158\|Ga0181521_10019591_ | GTTTCAATATTAGGTCCAGCCGGAGTCAGGCTGG | 35-37 |
| 3\|P (SEQ ID NO: 105) | AAC (SEQ ID NO: 150) | |
| | GTTCCAGCCTGACTCCGGCTGGACCTAATATTGA | |
| | AAC (SEQ ID NO: 204) | |
| 3300014159\|Ga0181530_10005765_ | GTTTCAATATTAGGTCCAGCCGGAGTCAGGCTGG | 35-37 |
| 11\|M (SEQ ID NO: 106) | AAC (SEQ ID NO: 150) | |
| | GTTCCAGCCTGACTCCGGCTGGACCTAATATTGA | |
| | AAC (SEQ ID NO: 204) | |
| 3300014638\|Ga0181536_10002122_ | GTTTCAATATTAGGTCCAGCCGGAGTCAGGCTGG | 35-37 |
| 15\|P (SEQ ID NO: 107) | AAC (SEQ ID NO: 150) | |
| | GTTCCAGCCTGACTCCGGCTGGACCTAATATTGA | |
| | AAC (SEQ ID NO: 204) | |
| 3300009632\|Ga0116102_1009001_2\| | GTTTCAACATTAGGTCCAGCCGGAGTCAGGCTGG | 29-37 |
| P (SEQ ID NO: 108) | AAC (SEQ ID NO: 151) | |
| | GTTCCAGCCTGACTCCGGCTGGACCTAATGTTGA | |
| | AAC (SEQ ID NO: 205) | |
| 3300009643\|Ga0116110_1007258_2\| | GTTTCAACATTAGGTCCAGCCGGAGTCAGGCTGG | 29-37 |
| M (SEQ ID NO: 109) | AAC (SEQ ID NO: 151) | |
| | GTTCCAGCCTGACTCCGGCTGGACCTAATGTTGA | |
| | AAC (SEQ ID NO: 205) | |
| 3300009643\|Ga0116110_1007258_2\| | GTTTCAACATTAGGTCCAGCCGGAGTCAGGCTGG | 29-37 |
| P (SEQ ID NO: 110) | AAC (SEQ ID NO: 151) | |
| | GTTCCAGCCTGACTCCGGCTGGACCTAATGTTGA | |
| | AAC (SEQ ID NO: 205) | |
| 3300017996\|Ga0187891_1001667_2 | GTTTCAATATTAGGTCCAGCCGGAGTCAGGCTGG | 35-37 |
| 3\|M (SEQ ID NO: 111) | AAC (SEQ ID NO: 150) | |
| | GTTCCAGCCTGACTCCGGCTGGACCTAATATTGA | |
| | AAC (SEQ ID NO: 204) | |
| 3300018003\|Ga0187876_1014226_2\| | GTTTCAATATTAGGTCCAGCCGGAGTCAGGCTGG | 35-37 |
| P (SEQ ID NO: 112) | AAC (SEQ ID NO: 150) | |
| | GTTCCAGCCTGACTCCGGCTGGACCTAATATTGA | |
| | AAC (SEQ ID NO: 204) | |
| 3300025453\|Ga0208455_1001030_8\| | GTTTCAACATTAGGTCCAGCCGGAGTCAGGCTGG | 29-37 |
| P (SEQ ID NO: 113) | AAC (SEQ ID NO: 151) | |
| | GTTCCAGCCTGACTCCGGCTGGACCTAATGTTGA | |
| | AAC (SEQ ID NO: 205) | |
| 3300025507\|Ga020818 8_1002252_2\| | GTTTCAACATTAGGTCCAGCCGGAGTCAGGCTGG | 29-37 |
| M(SEQ ID NO: 114) | AAC (SEQ ID NO: 151) | |
| | GTTCCAGCCTGACTCCGGCTGGACCTAATGTTGA | |
| | AAC (SEQ ID NO: 205) | |
| 3300025507\|Ga020818 8_1002252_2\| | GTTTCAACATTAGGTCCAGCCGGAGTCAGGCTGG | 29-37 |
| P (SEQ ID NO: 115) | AAC (SEQ ID NO: 151) | |
| | GTTCCAGCCTGACTCCGGCTGGACCTAATGTTGA | |
| | AAC (SEQ ID NO: 205) | |
| PJQE01000204_l\|M (SEQ ID NO: | TTCGGATCATCCGAAGATTT (SEQ ID NO: | 37-43 |
| 116) | 152) | |
| | AAATCTTCGGATGATCCGAA (SEQ ID NO: | |
| | 206) | |
| 3300006845\|Ga0075421_100006223 | GTGACTGCAGACTGGTCGTGCGAATGCGCACGGC | 34-35 |
| _8\|P(SEQID NO: 117) | AC (SEQ ID NO: 153) | |
| | GTGCCGTGCGCATTCGCACGACCAGTCTGCAGTC | |
| | AC (SEQ ID NO: 207) | |
| 3300006847\|Ga0075431_100017297 | GTGACTGCAGACTGGTCGTGCGAATGCGCAC | 39-40 |
| _1\|M (SEQ ID NO: 118) | (SEQ ID NO: 154) | |
| | GTGCGCATTCGCACGACCAGTCTGCAGTCAC | |
| | (SEQ ID NO: 208) | |
| 3300027909\|Ga0209382_10008589_ | GTGACTGCAGACTGGTCGTGCGAATGCGCACGGC | 34-35 |
| 8\|P(SEQ ID NO: 119) | AC (SEQ ID NO: 153) | |
| | GTGCCGTGCGCATTCGCACGACCAGTCTGCAGTC | |
| | AC (SEQ ID NO: 207) | |
| ODAK010035847_2\|M (SEQ ID NO: | GTTGCAGATATTGGTCCAGCCGGGGTTGGGCTGG | 36-38 |
| 120) | AAC (SEQ ID NO: 155) | |
| | GTTCCAGCCCAACCCCGGCTGGACCAATATCTGC | |
| | AAC (SEQ ID NO: 209) | |
| SRR6266511_1572288_18\|M (SEQ | AGTGATTGAAGGCTGGTCGTGCGAATGCGCACGG | 33-35 |
| ID NO: 121) | CAC (SEQ ID NO: 156) | |
| | GTGCCGTGCGCATTCGCACGACCAGCCTTCAATC | |
| | ACT (SEQ ID NO: 210) | |
| SRR6266511_203987_6\|P (SEQ ID | GCCGTGCGAATGCGCACGGCATG (SEQ ID | 33-51 |
| NO: 122) | NO: 157) | |
| | CATGCCGTGCGCATTCGCACGGC (SEQ ID | |
| | NO: 211) | |
| SRR6266511_239355_1\|M (SEQ ID | GTAATTGAAAGTTGGTCGTGCGAATCCGCACGGC | 26-40 |
| NO: 123) | AC (SEQ ID NO: 158) | |
| | GTGCCGTGCGGATTCGCACGACCAACTTTCAATT | |
| | AC (SEQ ID NO: 180) | |
| SRR6266511_838544_1\|M (SEQ ID | GTAATTGAAAGTTGGTCGTGCGAATCCGCACGGC | 34 -36 |
| NO: 124) | AC (SEQ ID NO: 158) | |
| | GTGCCGTGCGGATTCGCACGACCAACTTTCAATT | |
| | AC (SEQ ID NO: 180) | |
| 3300014502\|Ga0182021_10233972_ | GTTGCAGTGGTTGTCCATCGGGATTGAGCGATGG | 36 |
| 2\|M (SEQ ID NO: 125) | AAC (SEQ ID NO: 149) | |
| | GTTCCATCGCTCAATCCCGATGGACAACCACTGC | |
| | AAC (SEQ ID NO: 203) | |
| 3300005529\|Ga0070741_10001368_ | GTGACAACTCTTGCTCAACCGAGTCTCGGTTGAG | 36 |
| 72\|P (SEQ ID NO: 126) | AC (SEQ ID NO: 159) | |
| | GTCTCAACCGAGACTCGGTTGAGCAAGAGTTGTC | |
| | AC (SEQ ID NO: 212) | |
| 3300010046\|Ga0126384_10047357_ | GTGATTGAAGGCTGGTCGTGCGAATGCGCACGGC | 34-37 |
| 3\|M (SEQ ID NO: 127) | AC (SEQ ID NO: 160) | |
| | GTGCCGTGCGCATTCGCACGACCAGCCTTCAATC | |
| | AC (SEQ ID NO: 213) | |
| 3300010359\|Ga0126376_10030051_ | GTGATTGAAGGCTGGTCGTGCGAATGCGCACGGC | 35-37 |
| 2\|M (SEQ ID NO: 128) | AC (SEQ ID NO: 160) | |
| | GTGCCGTGCGCATTCGCACGACCAGCCTTCAATC | |
| | AC (SEQ ID NO: 213) | |
| 3300010362\|Ga0126377_101l1069_ | GTGATTGAAGGCTGGTCGTGCGAATGCGCACGGC | 35-37 |
| 2\|M (SEQ ID NO: 129) | AC (SEQ ID NO: 160) | |
| | GTGCCGTGCGCATTCGCACGACCAGCCTTCAATC | |
| | AC (SEQ ID NO: 213) | |
| 3300012204\|Ga0137374_10002290_ | GCCGTGCGAATGCGCACGGCATG (SEQ ID | 33-51 |
| 4\|M (SEQ ID NO: 130) | NO: 157) | |
| | CATGCCGTGCGCATTCGCACGGC (SEQ ID | |
| | NO: 211) | |
| 3300012204\|Ga0137374_10009879_ | AGTGATTGAAGGCTGGTCGTGCGAATGCGCACGG | 33-35 |
| 6\|P(SEQID NO: 131) | CAC (SEQ ID NO: 156) | |
| | GTGCCGTGCGCATTCGCACGACCAGCCTTCAATC | |
| | ACT (SEQ ID NO: 210) | |
| 3300012350\|Ga0137372_10022207_ | AGTGATTGAAGGCTGGTCGTGCGAATGCGCACGG | 33-35 |
| 3\|M (SEQ ID NO: 132) | CAC (SEQ ID NO: 156) | |
| | GTGCCGTGCGCATTCGCACGACCAGCCTTCAATC | |
| | ACT (SEQ ID NO: 210) | |
| 3300012350\|Ga0137372_10022207_ | AGTGATTGAAGGCTGGTCGTGCGAATGCGCACGG | 33-35 |
| 4\|P(SEQID NO: 133) | CAC (SEQ ID NO: 156) | |
| | GTGCCGTGCGCATTCGCACGACCAGCCTTCAATC | |
| | ACT (SEQ ID NO: 210) | |
| 3300012353\|Ga0137367_10000906_ | GCCGTGCGAATGCGCACGGCATG (SEQ ID | 33-51 |
| 4\|M (SEQ ID NO: 134) | NO: 157) | |
| | CATGCCGTGCGCATTCGCACGGC (SEQ ID | |
| | NO: 211) | |
| 3300012353\|Ga0137367_10004593_ | AGTGATTGAAGGCTGGTCGTGCGAATGCGCACGG | 33-35 |
| 5\|M (SEQ ID NO: 135) | CAC (SEQ ID NO: 156) | |
| | GTGCCGTGCGCATTCGCACGACCAGCCTTCAATC | |
| | ACT (SEQ ID NO: 210) | |
| 3300012355\|Ga0137369_10001944_ | GCCGTGCGAATGCGCACGGCATG (SEQ ID | 33-51 |
| 2\|P(SEQID NO: 136) | NO: 157) | |
| | CATGCCGTGCGCATTCGCACGGC (SEQ ID | |
| | NO: 211) | |
| 3300012355\|Ga0137369_10007378_ | AGTGATTGAAGGCTGGTCGTGCGAATGCGCACGG | 34-35 |
| 6\|M (SEQ ID NO: 137) | CAC (SEQ ID NO: 156) | |
| | GTGCCGTGCGCATTCGCACGACCAGCCTTCAATC | |
| | ACT (SEQ ID NO: 210) | |
| 3300012355\|Ga0137369_10043960_ | AGTAATTGAAAGTTGGTCGTGCGAATCCGCACGG | 33-36 |
| UM (SEQ ID NO: 138) | CAC (SEQ ID NO: 148) | |
| | GTGCCGTGCGGATTCGCACGACCAACTTTCAATT | |
| | ACT (SEQ ID NO: 202) | |
| 3300012358\|Ga0137368_10001884_ | GCCGTGCGAATGCGCACGGCATG (SEQ ID | 33-51 |
| 4\|M (SEQ ID NO: 139) | NO: 157) | |
| | CATGCCGTGCGCATTCGCACGGC (SEQ ID | |
| | NO: 211) | |
| 3300012358\|Ga0137368_10007571_ | AGTGATTGAAGGCTGGTCGTGCGAATGCGCACGG | 33-35 |
| 6\|P (SEQ ID NO: 140) | CAC (SEQ ID NO: 156) | |
| | GTGCCGTGCGCATTCGCACGACCAGCCTTCAATC | |
| | ACT (SEQ ID NO: 210) | |
| 3300012360\|Ga0137375_10064112_ | GCCGTGCGAATGCGCACGGCATG (SEQ ID | 33-51 |
| UP (SEQ ID NO: 141) | NO: 157) | |
| | CATGCCGTGCGCATTCGCACGGC (SEQ ID | |
| | NO: 211) | |
| 3300012532\|Ga0137373_10033017_ | GCCGTGCGAATGCGCACGGCATG (SEQ ID | 33-51 |
| UP (SEQ ID NO: 142) | NO: 157) | |
| | CATGCCGTGCGCATTCGCACGGC (SEQ ID | |
| | NO: 211) | |
| 3300012944\|Ga0137410_10000075_ | CGTAGCAATTGATGTTCAATGGATGAGCC (SEQ | 44 |
| 50\|P (SEQ ID NO: 143) | ID NO: 161) | |
| | GGCTCATCCATTGAACATCAATTGCTACG (SEQ | |
| | ID NO: 214) | |
| 3300015245\|Ga0137409_10000164_ | CGTAGCAATTGATGTTCAATGGATGAGCC (SEQ | 44 |
| 50\|P (SEQ ID NO: 144) | ID NO: 161) | |
| | GGCTCATCCATTGAACATCAATTGCTACG (SEQ | |
| | ID NO: 214) | |
| SRR6837571_912213_1\|M (SEQ ID | GTCGCGAATAACTGTTCAGCGGAGAAGCCGCTGA | 33-34 |
| NO: 145) | AAC (SEQ ID NO: 162) | |
| | GTTTCAGCGGCTTCTCCGCTGAACAGTTATTCGC | |
| | GAC (SEQ ID NO: 215) | |

TABLE 12
Non-coding Sequences of Representative
CLUST.099129 Systems

>SRR6837557_1470862_2|M
ACGAAGGGTTGGCCACGTTTGTGGAGCCGTGGCCGGGCGATGA
TGTGGCCGTATACGTGAAAGATGAAGCCGAGAATGTGAAACAG
GTGTTGGCGGTGACCAAGGCCGCCGGGCTGACGCCGATTGGGT
TTGTGAAAACGGAAGGGCTGTAATCTCGCCTTGATATTGGCTT
AATTTCAGGTTGAAAGTAAGAACGGGACACATAATGAGAACAA
CCAAAACCCCTGATTATTCCAATAAAAATCTGTCCTTCTGGTG
TGAGCCGGTCGGCGAAATGCCGAGTGTGGTTTTTGAAAAGGGT
CGGCAGATGAACCGGCTCTGGAATCTGCTGGTTGAGTGTCACA
CTACGTTTCTCCACCGACGGGATCAAGACAAGGGTTCCGCGAA
AATGCTATTTGAAGAGATTGACGAAGGTTATCGGCAGCAATCG
GCCCCGCTAAGCCTGGATTTGTTTACGGATCAGGCGGTTCGCG
CCATTCGCACCTTAAATCGCGAGATGGTTTGAGTTATAGGGCT
GACTACTCTC
(SEQ ID NO: 163)
>SRR6266511_239355_1|M
AAACAGTGGCGAGAGCCATATTATTGGGCCGCCTTCGTTCTGC
AGGGTGAATGGAAATAGCGATGGGCGCGTCAATTTCTCGGAAG
AAGGGATGGGGTGTCGCGCGACATAGATGAAAATGCAATGATG
CGGCAGGAGTTCAGCAAAGTGCAGGCGCAATCCGGAGGCATAG
ACAGAAGGCCCCTTCCGTGATTACATTAGTCTTCGCGCCTTCG
ATTGCCGGTTATAAACCGATAGCTCCCTTTCGCAAAATTTATG
GAAGATATATCCAAGAAGCCGGAGCGGCGTAAAAACTTCGCGC
GCCGAGAACGGCTGAACAAAGATTGGCCGTTTAAGGTCTACCC
CTACAGATGCATGCTGCGGGAGAAACCGCCCCAAGCGCTGTGG
GACACAGCGCGTGAGATGGACGTGACCACAAGCCTATACCTGC
TGAGTAAGATAGAAGGCTACGCAAGCGCCAGTGGCCCTCCTAT
TGAAATTCCGGCGCATCTGAGCCAATACTTGCGAGTGATGCAC
GCAAGTGAAGTGCGGCTTGAGATTGTTGAAAAGCATTGACACT
CCCACCGCTGGAAGCGGCGGGATTCTTGCTTCAACGCGAACGG
CCTGCCGTGGCAGGTCTTACACTCGCTCCACAAGCGTTTTGAC
TCTCCGCGTGCCCCGCGGCGAGGAGAATGTTGATTCCTTCGTT
TCTGATGTTTTTGGCCGCGTTACGATCTCGATCATGCCGCGCG
CCGCAATTGACGGATTTGCCTGTTTGTTGATAGGCCTCCTTTC
GGCGCGCCAACGCCCAGTTGAAGACGAATCTGCGCGCGCCCGC
GAAACGGGCGAAAGCCGTCTCCTCGTCGGCGGTCGGATCGAGC
CTGAATCTGTAGACCTTTCGTTCCGGCATTCAATCTCTAGTGC
CCTGCGAGTTGATGTATTCGCCAAATCCACGTCGTGGGCGGGC
ATCGGGGAGTCAATGGCGTTACGCGTTGCTTCGCGCCGCGCCT
GTCATCCCCCCGCTGGAAGCGGAGGGCTTTCTTTGGCTTTTTT
TGAAAGTGGCTAAGGTGCCCATCACAGTTCGAAAAAGTAATTG
AAATGGTGATCTATGTTCAATCAAACCGTACCAGTCGCAAACC
CGCAGGGTAGGCGGGGAGCGACTGCCCGCCACACCGTTCAGAT
TATCAACCTGATCCTTTGGGCTGGATTGTCAGTTTCTCCATGC
CTGTGGCCAGGGGCGGAGCCTGCGCAAGCCTCC
(SEQ ID NO: 164)
>SRR6837571_912213_1|M
GAAGGGTTGGCCACGTTAGTGGAGCCGTGGCCGGGCGATGATG
TGGCCGTATACGTGAAAGATGAAGCCGAGAATGTGAAACAGGT
GTTGGCGGTGACCAAGGCCGCCGGGCTGACGCCGATTGGGTTT
GTGAAAACGGAAGGGCTGTAATCTCGCCTTGATATTGGCTTAA
TTTCAGGTTGAAAGTAAGAACGGGACACATAATGAGAACAACC
AAAACCCCTGATTATTCCAATAAAAATCTGTCCTTCTGGTGTG
AGCCGGTCGGCGAAATGCCGAGTGTGGTTTTTGAAAAGGGTCG
GCAGATGAACCGGCTCTGGAATCTGCTGGTTGAGTGTCACACT
ACGTTTCTCCACCGACGGGATCAAGACAAGGGTTCCGCGAAAA
TGCTATTTGAAGAGATTGACGAAGGTTATCGGCAGCAATCGGC
CCCGCTAAGCCTGGATTTGTTTACGGATCAGGCGGTTCGCGCC
ATTCGCACCTTAAATCGCGAGATGGTTTGAGTTATAGGGCTGG
CAGAGCCGTTGAAATACTCTCGTCAAAGATCAAAAGTTAGTTT
GGCAATAAATGTGGCTTTACTTTATAACCTAGTAGTGTTATAG
TTCACCCGTTGTTGGATGTGCTTAACTTTTACAACTTTGGTG
(SEQ ID NO: 165)
>SRR6266511_838544_1|M
AAACAGTGGCGAGAGCCATATTATTGGGCCGCCTTCGTTCTGC
AGGGTGAATGGAAATAGCGATGGGCGCGTCAATTTCTCGGAAG
AAGGGATGGGGTGTCGCGCGACATAGATGAAAATGCAATGATG
CGGCAGGAGTTCAGCAAAGTGCAGGCGCAATCCGGAGGCATAG
ACAGAGAGCCCCTTCCGTGATTACATTAGTCTTCGCGCCTTCG
ATTGTCGGTTATTAACCGATAGCTCCCTTTCGCAAAATTTATG
GAAGATATATCCAAGAAGCCGGAGCGGCGTAAAAACCCCGCGC
GCCGAGAGCGACTGAACAAAGATTGGCCAATTAAGGTCCATAA
CTATAGATGCTCGCTGAATGAGAAACCGCCCCAGACGCTCTGG
GATACGGCGCACGAGATGGATCAGGACGTGACCACAAGCCTAT
ACCTGCTGAGTAAGATAGAAGGCTGCGCAAGCGCCAGTGGCCC
TCCTATTGAAATTCCAGCGCATCTGAGCCCATACTTGCGAGTG
ATGACCGCAAGTGAAGTGGCTCTTGAGATTGTTGAATAGCATG
AAAGTGGCTAAAGTACCCATCAAAGTTCGAAAAAGTAATTGAA
ATGGTGATCTATGTTCAATCAAATCGTACCAGTCGCAAACCCG
CAGGGTAGGCGGGGAGCGACTGCCCGCCACACCGTTCAAATTA
TCAACCTGATCCTTTGGGCTGGATTGTCAGTTTCTCCATGCCT
GTGGCCAGGGGCGGAGCCTGCGCAAGCCTCCGCTAGTGAACGC
GGCGCGGCGCGCCGCGTTCAGGAGAGTATTTCGCTGGAACCGG
GCAAGCCGATCGAGCGAGAGCCCTCCGGCGGCGAGTCGCATTC
CTAC
(SEQ ID NO: 166)
>3300025507|Ga0208188_1002252_2|M
GCAACGATGTTCTTTGTATATGCCAGGCTGTTCTTTTCTCCGG
CCGCTTCTTTGGGGCAGACAAGCAAAATGGTCGCGTTGGATGA
CCTGAGGTCAATTAGAGAATTGTCCCTAGCGAGATCCAGGAGC
CGTTCGAGCTTCTTAACCAAACTGCCCGTACTTCTCACAGAGC
GGTTTGGGATCGGACGCCGCGCAAGGTATCGCCTCATGTAATC
GGGGTTCGCTTTACGCCATTTCCGCTGGCTGCGACGGCACTGT
TCCTTGTAGGCAGGATCGGTGTCGAGTTTCCATCGGTGATAGT
CCGCGCGGCGTCGACGTTGGCATTCGCCGGAGCCGCAGACTTT
CTGATTAGGATGATAGCGGGATGGCTTAAATCTTCGTTTGCAG
TAAGGACATGTCTTTTGTCGCATACGATTTGTGGAAGCAGTCT
GTGTTAGAACTACTTCGGAGGGGAGAGCGAGGCGCCAATTAGA
CGTTCACTCAGCAACCGCGCCCTGTATAATGAGAGCGGAATGG
GATATTGATAATCGTGCTCAGCGTCCTAGGACAGGTGGGCTGG
ACACCGTCCCGGCGCTTGAGTGAGTGGTGAAGATAGCTCACGG
CATCGAAGAATGTCCGCAAGGACGATAGAGGAAAGAAAAGGCA
AAACCAGCATGCAGAGAGAGCGCAAGCGCAAAAAGACCCACGA
CATAAGGCCACATAAGTACCGCGCATGGTTCGCCGAAGGTGAT
GGAACCCGGCTGCCGGAGCCCATCTTTGCGACCTGCGCGGCTT
GCGGCTCGCATTTCGAAGCGGGGGCCGGGCTCATGGGGCGCTG
CGAGCAGGGGCACGTGATGGACCAGGACTGGAATGCGGCCGGG
AACATCTACGCAGGCCGAGCGGGCGCCACCGCGCAAGCGGCAG
TCGGGTAAGAATGGGGGCGGCACGAGGAGGCGACCAGGTGCGT
TTGCATCCCGCGTGGGGGGTCGGCACATCAGAGTCCAGCCGTA
CGCAGGCTGGGGCTAGCAACTGATGCACTGGGGGGTAAGAACG
GGTATTTGCGAAAAGGGTCATGCTACGGGCCAGGACCTTGACG
GAGCAGAGAGCAACTACGCAAACCGGGGCGGGGCTGCCGCCGC
CGCGGGGTTTGCGTAAAAGCTGTGCCGACAAATGCGCCAAATA
TATGTTAGTGTTGTGGGTTGTGGAGCGGTTCGTGCTTCCCTCG
CGGCGGGAATCGGTCAGATGCTGCGGGATCAATTATCCGTTTT
CGGATCTGCTTGACGCACGCGCTCCGAAAGCTCACCATTTACA
CAAGACCTCGACGGGATCGGTCTGGCAAGCGACGACCCTGACA
CCTGCGGAGATGGCGTCGATCAGCTACTCCGATTCAGAGCAAT
CCAGTAGCAGAATGGAACGTGTGGTTGGGGCAGAAGCGCGCAG
CTCTCGAACGACCTTAACACCCCCTGGGGACCACCTTCCAGAT
TCGAGCTGATCACAGCTGCATTCGGGCGATACTCGGCTACTTG
CTCAAAAACTCCTTTGGTGTGTGTTTAGCCCCCAACAACCAAG
TGCTTGCGCTGCTTTTTGAGCGCACGGCACAGCACCTTGCCGA
CCAGCGCTGTGCGTTGGGCGACGACAACTGATATAGGCACGGG
CGTGATTCCCTCCTAACCCGAAGTTCCAAGAGGCTGCAGAGAG
TATTCTACTGATTCACTGAGAGATAGTAGCAAACTCAATTTCC
CGTTACTGGGAACGTACGAATCAGTTCGCGCGCCCGCGCTTGT
AGGGGTGTGGGAGTCGGCACCTGTTGGCAGGTCAGGCTCGCGT
CTCCCGATTTGATCTGATAGGTGACCCTCGCCCGGCTGGCCAA
CTCGGCGAGCAG
(SEQ ID NO: 167)
>3300014158|Ga018152l_10019591_3|P
AACCAATTGAAGGCTGCATAGAATAGTGGCCAGCGCCATCTTC
TCAAAACGGCAATTCAGCTTGCTCGCCGCAGCAGGCGACAATC
GCTTGCTGCCGAAATGTTGAGAGGCCTCGCGAATGTGGGCTGC
GAGATTACGTATGCTTTTCATTTTGTTTGGTTCGGACTAGACT
CAATATCCTATGCAAAGGGAGCGCAAGCGCAAGGAGAGCCACG
ACATAAGGCCACACAAGTACCGGGCGTGGTTCGCCGAGGGCGA
CGGGACCAGGCTTCCCGAGCCTGTCTATTTGCTTGCAAAGCGC
ATGCAGGATTGCTGGACGGACATTGCGCTCACATGCGCGGCTT
GCGGCTCGCATTTCGAGGCGGGGGCCGGGCTCATGGGGCGCTG
CGAGCAGGGGCACGTGATGGACCAGGACTGGAATGCGGCCGGG
AACATCTACGCAGGCCGAGCGGGCGCCACGGCGCAAGCGGCAG
TCGGGTAAGAATGGGGGCGGCGCGAGGAGGCGACCAGGTGCGT
TTGCATCCGGCGTGGAGGGTCGGCACATCAGAGTCCAGCCGCA
CCCAGGCTGGGGCAAGCAACTGATGCACAGGGGTGTAAGAACG
GGTACTTGCGAAAAGGGTCATGCTATGGGCCAGGACCTTGACG
GAGCAGAGAGCAATTGCGCAAACCGGGGCGGGGCTGCCGCCGC
CGCGGGGTTTGCGTAAAATCTGTGCCGACAAATGCGCCAAATA
TATGTTAGTGTTGTGGGTTGTGGAGCGCTTCATGGAAATGAAT
CACTGCGAATCTCTTCGCAAGATTCAAATACTGAACTGATTAA
ACGTCAGCTACGGGCTGTCCGATAGTATGGCGCAATGATACCG
GTGATGGAGATGTTACAATCTGCGTGAATAGTGGGGACGAAGT
ACAAGTAGACGGCCCCGGCGGCAGTACGTCAATTGGAACCGAT
CACGTTCTGCCCCCCATCGCCGCAAAGGGATCATGATAAAGTG
TCGTCATTTTGCAGCCTGCGGCGCCCCGCGACCGCGTTCAGAT
CCCGTGATTCGACCTCCAATGGCATGCTTCTCCTTGGGCCCTG
CGCGACTGTAGCTTCCGACTTGTTCACTATCCTCCTGCTTCGT
CTGACCCTCGCTCGATTTTACTTTTATGGTAAGATTGCCTCCA
TCTGGCCGCTGGGGCTCTGGTGGAGATCGTGTGATTACGGCAA
AGGACACGAGCAATCCAGTAGGAGGATGGAACGCGTAGTTGGG
GCAGAAGCGCGCAGCTCTCGAACGACCTTAACACCCGCCTGGG
GATTACCTTCCAGATTCGAGCTGATCACAGCTACATTCGGTTG
ATACTCAACTACGTGCTCAAAAAACTTCTTTGGTGTGTGTTCA
GCCCACAACAACCAAGCGCCTGCGCTGCTCTTTGAGCGCACGG
ACCAGCACCTTGCCGACCAGCGCTGTGCGTTGGGCGACGATAA
CTGATATAGGCCAGGGCGTGATTCCTTCCTAACCGCTCCGGTA
TTGTCCGGGGTAGCCCGCTGATCGCTGAACAGAAGTCTCGTAG
CCTCATTTAGCAGGAGCAGTTCGCTGGTCGGCCATCACCACGC
GCCCCTCGCCGACTGAGAGGATGCTATCCGCCAACTCCCAGAC
AAGTGCTGTATGGCAGATAAAGATCATTTGGTGGAATCCGCCA
AGATCCATGGCACGGCGCAGCAT
(SEQ ID NO: 168)
>3300014502|Ga0182021_10233972_2|M
AGAGGCTGACACCGCACCGCAGCAGCCTCAACTGCCCGTCTGG
TTGACGGCGCTGAACCCCAGGCGCATCACTGCCTGGGTCTACG
AACTGAGTAACGGAGTACGCTTCGAAGCACGCGGCGGCGGATG
GGTGCAGCAAGGCGGGAGAAATTCGGAGTGGGTCTATACCACC
ACGAACGGTCCGCGAGATTTCGGTGTCGCTGGTTAACAACGGC
TTCTACTCGACCGGGCGACGGGAAAGTTGTAACACGCGCGCCA
GTGGGATATTCGTTTCTATAGAAACACTGTGAGCGATGTGACG
TTTTATTTCGAATTGATTAGAAGCCTGTTGGAGCAGCAATGAA
ACCTAAAAAGAACGCCGACACGATCTACCAAACCTACAAATTC
TGGATCAAGCCGAGCGACCCCCTGCCTCAATTATTGTGGGACA
AAGCGAAGGCCATGAATGCCGCGTGGACGAGTTTAGTCCTCAT
GCGTCAGGAGACGCTGGTGAGAAACCTAACC
(SEQ ID NO:
169)
>3300005764|Ga0O66903_100343966_1|M
CGGTTATAAACCGATAGCTCCCTTTCGCAAAATTTATGGAAGA
TATATCCAAGAAGCCGGAGCGGCGTAAAAACCCCGCGCGCCGA
GAACGACTGAACAAAGATTGGCCAATTAAGGTCCATAACTATA
GGTGCTCGCCGAATGAGAAACCGCCCCAGGCGCTCTGGGACAC
GGCGCACGAAATGGATCAGGATGTAACTGCAAGTCTGTACTTG
CTGAGTAAGATAGAAGGCTACGCAAGCATCAGTGGCCCTCCTA
TTGAAATTCCGGCGCATCTGAGCCCTTACTTGCGGGTGATGAC
CGCAAGTGATGTGGCTCTTGAGATTGTTGAATAGCTGAAAGTG
GCTAAGGTAGTCGCACGTGAAAAAGTGTAAAAGCCAATAAAAA
CGGCATGTTCATCGAGAATCACACCGTGTAGAATTGCAAGAAA
GCAGTAGAAACCT
(SEQ ID NO: 170)
>3300009643|Ga0116110_1007258_2|M
CGGAGGGGAGAGCGAGGCGCCAATTAGACGTTCACTCAGCAAC
CGCGCCCTGTATAATGAGAGCGGAATGGGATATTGATAATCGT
GCTCAGCGTCCTAGGACAGGTGGGCTGGACACCGTCCCGGCGC
TTGAGTGAGTGGTGAAGATAGCTCACGGCATCGAAGAATGTCC
GCAAGGACGATAGAGGAAAGAAAAGGCAAAACCAGCATGCAGA
GAGAGCGCAAGCGCAAAGAGACTCACGACATAAGGCCACATAA
GTACCGCGCATGGTTCGCCGAAGGTGATGGAACCCGGCTGCCG
GAGCCCATCTTTGCGACCTGCGCGGCTTGCGGCTCGCATTTCG
AAGCGGGGGCCGGGCTCATGGGGCGCTGCGAGCAGGGGCACGT
GATGGACCAGGACTGGAATGCGGCCGGGAACATCTACGCAGGC
CGAGCGGGCGCCACCGCGCAAGCGGCAGTCGGGTAAGAATGGG
GGCGGCACGAGGAGGCGACCAGGTGCGTTTGCATCCCGCGTGG
GGGGTCGGCACATCAGAGTCCAGCCGTACGCAGGCTGGGGCTA
GCAACTGATGCACTGGGGGGTAAGAACGGGTATTTGCGAAAAG
GGTCATGCTACGGGCCAGGACCTTGACGGAGCAGAGAGCAACT
ACGCAAACCGGGGCGGGGCTGCCGCCGCCGCGGGGTTTGCGTA
AAAGCTGTGCCGACAAATGCGCCAAATATATGTTAGTGTTGTG
GGTTGTGGAGCGGTTCGTGCTTCCCTCGCGGCGGGAATCGGTC
AGATGCTGCGGGATCAATTATCCGTTTTCGGATCTGCTTGACG
CACGCGCTCCGAAAGCTCACCATTTACACAAGACCTCGACGGG
ATCGGTCTGGCAAGCGACGACCCTGACACCTGCGGAGATGGCG
TCGATCAGCTACTCCGATTCAGAGCAATCCAGTAGCAGAATGG
AACGTGTGGTTGGGGCAGAAGCGCGCAGCTCTCGAACGACCTT
AACACCCCCTGGGGACCACCTTCCAGATTCGAGCTGATCACAG
CTGCATTCGGGCGATACTCGGCTACTTGCTCAAAAACTCCTTT
GGTGTGTGTTTAGCCCCCAACAACCAAGTGCTTGCGCTGCTTT
TTGAGCGCACGGCACAGCACCTTGCCGACCAGCGCTGTGCGTT
GGGCGACGACAACTGATATAGGCACGGGCGTGATTCCCTCCTA
ACCCGAAGTTCCAAGAGGCTGCAGAGAGTATTCTACTGATTCA
CTGAGAGATAGTAGCAAACTCAATTTCCCGTTACTGGGAACGT
ACGAATCAGTTCGCGCGCCCGCGCTTGTAGGGGTGTGGGAGTC
GGCACCTGTTGGCAGGTCAGGCTCGCGTCTCCCGATTTGATCT
GATAGGTGACCCTCGCCCGGCTGGCCAACTCGGCGAGCAG
(SEQ ID NO: 171)
>ODAK010035847_2|M
CCTCTTCCCTTAACTGTTTTCCTCCCGTGGCGGATTCCGTTCT
GATGCCATCGAGTTTTTCGCCACTGCTCTTCGTCAATGAGACG
ATCTGCCCGGAGAATTTTTCAAGTTGAATTTTCTCGGCACCCG
CCAAATCTTTAATTGTCTTGGACATCGTTTCGGAAATACTGTT
GAGCGTGGTAACAACTTCTTCTCGAAGGTGCTGGGCACTAGCG
GCGGACTCGGTACGACCACAGTCGAGCCTTTCGACGCTGGTTT
GGGCAAAGGCGGCAAGCTGGGTTGCAAATCCTTCAAACTGTGA
CTTTTGGGCTGAAGCCAGACCGCTTATCGTTTTTGTTATCGTC
TCGGAAATGGTGCTGAGAGTCGCTACTACTTCTTCCCGTAGTT
GCTTGGCTCCCGTGGCGGATTCGGTGCGAACACCATCCAATCG
CGCACCGCTCGCTTTAGCGAACGAGGCAAGCTGCTCAGAGAAA
GCGTCAAGTTGGCTTTTCTGGACATTAGCCCACTCCCGCATCG
TCCCCGTCGTCGTCTCCGAGATGCTAGTCAGCGTTGCCACGAC
TTCCTGCCGCTGCTCCTTCGCGGCCTTACCCAGTTCGACCCTA
CTCTGGGCAACTTCCTCACCCAGTTCGTCCCTACTCTGGGCAA
CTTCCTCTCTGACTGCACGCTCGGTGCGTTCTTGAGCCTTTTC
AAAAGCATCCAGACGGGAATCGAGCATTGGCGAGCCGACTTTG
GATGTTTTCATCAAAAGGGCAAGGAGAAGAGCCACCACAACGA
CCAGCAGGACGAGAGTCACGACAGGCATAAATTTGAAGTCTTT
CCGAGTAGGGACGATTATCGAACCCACTCATCAGGGTCGGGGG
TTCAAGCCGCAGCCAGTTGTCTCAGTCTGGGTTCCCTTGGAGT
GTTGGCTGAGGTTCAAGTCGCCGGGGAAGAAAATGCGACCAGT
ATGTAACCTTAACGCAAGAACCTACCGAAACTCGTGACCCAAA
TCACAGTCTGTGGTGACTGGAAACACCAAGGCCCCAAACACTC
CGGAGGCAATCAAAGTGGCAGCACGCGGGTCACCCTTTCGCTG
GCGGAACGTGATGCCCAAGATCGGCGTATCGCCGCCGTCGCTG
AAACACTAGGAGGGAAGGCTTTTTGAATTAGGGACGAGAAATC
CACATTAAATTCACATTGAAATCGTGCTACATTTCGGCGGATA
TGTAGAGCCGAGTGACGGCTTTCGGCTGGAAACGTATACTACG
ATTATGCGAGAGCGTAAGCGCCAAGAGACGCACGGACAGATGG
CTTATAAGTTTCGTGCCTACGTCACCGGAACAGACGCCAGCCA
CGGGCAGATGTTGCCCCCGGCGATTTACACCGTCGCTAAGAAC
ATGGAGAACTGCTGGTCGGACATCGCCAATCATAACGAGCAAG
AATACGGGGCTTGGAAGATCTGTTCCGAATGTGGGGCTTTGTT
TGAAGCAGGTAGCGAGATTATAGGACGTTGCACGCGGGGGCAC
GAAAAAGACCAAGATTGGAATGCAGCCGAGAACATTTACGCAT
ACTCCAGCGCTCCAGTCGCAGAACTATTATCTGCGTAAAAACG
CAGGCGAAGGATGCTCTTTGACAATTCATTTTGTGCAACTTGT
GGAGCG
(SEQ ID NO: 172)
>3300009632|Ga0116102_1009001_2|P
ACCTGCGCGGCTTGCGGCTCGCATTTCGAAGCGGGGGCCGGGC
TCATGGGGCGCTGCGAGCAGGGGCACGTGATGGACCAGGACTG
GAATGCGGCCGGGAACATCTACGCAGGCCGAGCGGGCGCCACC
GCGCAAGCGGCAGTCGGGTAAGAATGGGGGCGGCACGAGGAGG
CGACCAGGTGCGTTTGCATCCCGCGTGGGGGGTCGGCACATCA
GAGTCCAGCCGTACGCAGGCTGGGGCTAGCAACTGATGCACTG
GGGGGTAAGAACGGGTATTTGCGAAAAGGGTCATGCTACGGGC
CAGGACCTTGACGGAGCAGAGAGCAACTACGCAAACCGGGGCG
GGGCTGCCGCCGCCGCGGGGTTTGCGTAAAAGCTGTGCCGACA
AATGCGCCAAATATATGTTAGTGTTGTGGGTTGTGGAGCGGTT
CGTGCTTCCCTCGCGGCGGGAATCGGTCAGATGCTGCGGGATC
AATTATCCGTTTTCGGATCTGCTTGACGCACGCGCTCCGAAAG
CTCACCATTTACACAAGACCTCGACGGGATCGGTCTGGCAAGC
GACGACCCTGACACCTGCGGAGATGGCGTCGATCAGCTACTCC
GATTCAGAGCAATCCAGTAGCAGAATGGAACGTGTGGTTGGGG
CAGAAGCGCGCAGCTCTCGAACGACCTTAACACCCCCTGGGGA
CCACCTTCCAGATTCGAGCTGATCACAGCTGCATTCGGGCGAT
ACTCGGCTACTTGCTCAAAAACTCCTTTGGTGTGTGTTTAGCC
CCCAACAACCAAGTGCTTGCGCTGCTTTTTGAGCGCACGGCAC
AGCACCTTGCCGACCAGCGCTGTGCGTTGGGCGACGACAACTG
ATATAGGCACGGGCGTGATTCCCTCCTAACCCGAAGTTCCAAG
AGGCTGCAGAGAGTATTCTACTGATTCACTGAGAGATAGTAGC
AAACTCAATTTCCCGTTACTGGGAACGTACGAATCAGTTCGCG
C
(SEQ ID NO: 173)
>3300012971|Ga0126369_10127246_1|M
ACCCAATGCCAGTCCAGCATGTGCAGAGAACACCAATGATTGA
AGAGAAGACTGCTAAGCGTAAAAACCCAGTCAGGCGAGAGCGC
CTGAACAAAGACTGGCCGATCAAGGTCTACACCTATGACTGTT
GGCCGCAAGAAAAGCCGCTCAAGGCGCTATGGGACACGGCGCA
TGAGATGAGGCGGTCTGATGCGTTGGAATATTTGCGGGGATTG
ATTG
(SEQ ID NO: 174)

### Example 5—Functional Validation of Three Engineered CLUST.099129 CRISPR-Cas Systems

[0409] Having identified components of CLUST.099129 CRISPR-Cas systems, three loci were selected for functional validation: 1) a locus from the metagenomic source designated SRR6837557 (SEQ ID NO: 101), 2) a locus from the metagenomic source designated 3300012971 (SEQ ID NO: 102), and 3) a locus from the metagenomic source 3300005764 (SEQ ID NO: 103).

### DNA Synthesis and Effector Library Cloning

[0410] To test the activity of the exemplary CLUST.099129 CRISPR-Cas systems, systems were designed and synthesized using a pET28a(+) vector. Briefly, an E. coli codon-optimized nucleic acid sequence encoding the CLUST.099129 SRR6837557 effector (SEQ ID NO: 101 shown in TABLE 10), an E. coli codon-optimized nucleic acid sequence encoding CLUST.099129 3300012971 effector (SEQ ID NO: 102 shown in TABLE 10), and an E. coli codon-optimized nucleic acid sequence encoding CLUST.099129 3300005764 effector (SEQ ID NO: 103 shown in TABLE 10) were synthesized (Genscript) and individually cloned into a custom expression system derived from pET-28a(+) (EMD-Millipore). The vectors included the nucleic acid encoding CLUST.099129 effectors under the control of a lac promoter and an E. coli ribosome binding sequence. The vector also included an acceptor site for a CRISPR array library driven by a J23119 promoter following the open reading frame for the CLUST.099129 effector. The non-coding sequence used for the CLUST.099129 SRR6837557 effector (SEQ ID NO: 101) is set forth in SEQ ID NO: 163, the non-coding sequence used for the CLUST.099129 3300012971 effector (SEQ ID NO: 102) is set forth in SEQ ID NO: 174, and the non-coding sequence used for the CLUST.099129 3300005764 effector (SEQ ID NO: 103) is set forth in SEQ ID NO: 170, as shown in TABLE 12. An additional condition was tested, wherein the CLUST.099129 SRR6837557 effector (SEQ ID NO: 101) was individually cloned into pET28a(+) without the non-coding sequence. See FIG. 1A.

[0411] An oligonucleotide library synthesis (OLS) pool containing “repeat-spacer-repeat” sequences was computationally designed, where “repeat” represents the consensus direct repeat sequence found in the CRISPR array associated with the effector, and “spacer” represents sequences tiling the pACYC184 plasmid or E. coli essential genes. In particular, the repeat sequence used for the CLUST.099129 SRR6837557 effector (SEQ ID NO: 101) is set forth in SEQ ID NO: 146, the repeat sequence used for the CLUST.099129 3300012971 effector (SEQ ID NO: 102) is set forth in SEQ ID NO: 147, and the repeat sequence used for the CLUST.099129 3300005764 effector (SEQ ID NO: 103) is set forth in SEQ ID NO: 148, as shown in TABLE 11. The spacer length was determined by the mode of the spacer lengths found in the endogenous CRISPR array. The repeat-spacer-repeat sequence was appended with restriction sites enabling the bi-directional cloning of the fragment into the aforementioned CRISPR array library acceptor site, as well as unique PCR priming sites to enable specific amplification of a specific repeat-spacer-repeat library from a larger pool.

[0412] Next, the repeat-spacer-repeat library was cloned into the plasmid using the Golden Gate assembly method. Briefly, each repeat-spacer-repeat was first amplified from the OLS pool (Agilent Genomics) using unique PCR primers and pre-linearized the plasmid backbone using BsaI to reduce potential background. Both DNA fragments were purified with Ampure XP (Beckman Coulter) prior to addition to Golden Gate Assembly Master Mix (New England Biolabs) and incubated per the manufacturer's instructions. The Golden Gate reaction was further purified and concentrated to enable maximum transformation efficiency in the subsequent steps of the bacterial screen.

[0413] The plasmid library containing the distinct repeat-spacer-repeat elements and CRISPR effectors was electroporated into E. Cloni electrocompetent E. coli (Lucigen) using a Gene Pulser Xcell® (Bio-rad) following the protocol recommended by Lucigen. The library was either co-transformed with purified pACYC184 plasmid or directly transformed into pACYC184-containing E. Cloni electrocompetent E. coli (Lucigen), plated onto agar containing chloramphenicol (Fisher), tetracycline (Alfa Aesar), and kanamycin (Alfa Aesar) in BioAssay® dishes (Thermo Fisher), and incubated for 10-12 hours at 37° C. After estimation of approximate colony count to ensure sufficient library representation on the bacterial plate, the bacteria were harvested, and plasmid DNA WAS extracted using a QIAprep Spin Miniprep® Kit (Qiagen) to create an “output library.” By performing a PCR using custom primers containing barcodes and sites compatible with Illumina sequencing chemistry, a barcoded next generation sequencing library was generated from both the pre-transformation “input library” and the post-harvest “output library,” which were then pooled and loaded onto a Nextseq 550 (Illumina) to evaluate the effectors. At least two independent biological replicates were performed for each screen to ensure consistency. See FIG. 1B.

### Bacterial Screen Sequencing Analysis

[0414] Next generation sequencing data for screen input and output libraries were demultiplexed using Illumina bcl2fastq. Reads in resulting fastq files for each sample contained the CRISPR array elements for the screening plasmid library. The direct repeat sequence of the CRISPR array was used to determine the array orientation, and the spacer sequence was mapped to the source (pACYC184 or E. Cloni) or negative control sequence (GFP) to determine the corresponding target. For each sample, the total number of reads for each unique array element (rₐ) in a given plasmid library was counted and normalized as follows: (rₐ+1)/total reads for all library array elements. The depletion score was calculated by dividing normalized output reads for a given array element by normalized input reads.

[0415] To identify specific parameters resulting in enzymatic activity and bacterial cell death, next generation sequencing (NGS) was used to quantify and compare the representation of individual CRISPR arrays (i.e., repeat-spacer-repeat) in the PCR product of the input and output plasmid libraries. The array depletion ratio was defined as the normalized output read count divided by the normalized input read count. An array was considered to be “strongly depleted” if the depletion ratio was less than 0.3 (more than 3-fold depletion), depicted by the blue dashed line in FIG. 17, FIG. 20, FIG. 23, and FIG. 26. When calculating the array depletion ratio across biological replicates, the maximum depletion ratio value for a given CRISPR array was taken across all experiments (i.e. a strongly depleted array must be strongly depleted in all biological replicates). A matrix including array depletion ratios and the following features were generated for each spacer target: target strand, transcript targeting, ORI targeting, target sequence motifs, flanking sequence motifs, and target secondary structure. The degree to which different features in this matrix explained target depletion for CLUST.099129 systems was investigated.

[0416] FIG. 17, FIG. 23, and FIG. 26 show the degree of interference activity of the engineered compositions, with a non-coding sequence, by plotting for a given target the normalized ratio of sequencing reads in the screen output versus the screen input. The results are plotted for each DR transcriptional orientation. In the functional screen for each composition, an active effector complexed with an active RNA guide will interfere with the ability of the pACYC184 to confer E. coli resistance to chloramphenicol and tetracycline, resulting in cell death and depletion of the spacer element within the pool. Comparison of the results of deep sequencing the initial DNA library (screen input) versus the surviving transformed E. coli (screen output) suggests specific target sequences and DR transcriptional orientations that enable an active, programmable CRISPR system. The screen also indicates that the effector complex is only active with one orientation of the DR. As such, the screen indicated that the CLUST.099129 SRR6837557 effector was active in the “reverse” orientation (5′-AGTC . . . AAAC-[spacer]-3′) of the DR (FIG. 17), that the CLUST.099129 3300012971 was active in the reverse orientation (5′-GTGA . . . GCAC-[spacer]-3′) of the DR (FIG. 23), and that the CLUST.099129 3300005764 effector was active in the forward orientation (5′-GTGC . . . TACT-[spacer]-3′) of the DR (FIG. 26).

[0417] FIG. 18A and FIG. 18B depict the location of strongly depleted targets for the CLUST.099129 SRR6837557 effector (plus non-coding sequence) targeting pACYC184 and E. coli E. Cloni essential genes, respectively FIG. 24A and FIG. 24B depict the location of strongly depleted targets for the CLUST.099129 3300012971 effector (plus non-coding sequence) targeting pACYC184 and E. coli E. Cloni essential genes, respectively. FIG. 27A and FIG. 27B depict the location of strongly depleted targets for the CLUST.099129 3300005764 effector (plus non-coding sequence) targeting pACYC184 and E. coli E. Cloni essential genes, respectively. Flanking sequences of depleted targets were analyzed to determine the PAM for CLUST.099129 effectors. WebLogo representations (Crooks et al., Genome Research 14: 1188-90, 2004) of the PAM sequences for CLUST.099129 SRR6837557, CLUST.099129 3300012971, and CLUST.099129 3300005764 are shown in FIG. 19, FIG. 25, and FIG. 14, respectively. The “20” position corresponds to the nucleotide adjacent to the 5′ end of the target. As such, multiple effectors of CLUST.099129 revealed activity in vivo.

[0418] Furthermore, FIG. 20 shows that the CLUST.099129 SRR6837557 effector retains activity in the absence of the non-coding sequence. In agreement with FIG. 17, the CLUST.099129 SRR6837557 effector, without the non-coding sequence, was active in the reverse orientation (5′-AGTC . . . AAAC-[spacer]-3′) of the DR. FIG. 21A and FIG. 21B depict the locations of the strongly depleted targets for the CLUST.099129 SRR6837557 effector, without the non-coding sequence, targeting pACYC184 and E. coli E. Cloni essential genes, respectively. A WebLogo of the PAM sequence for CLUST.099129 SRR6837557, without the non-coding sequence, is shown in FIG. 22, where the “20” position corresponds to the nucleotide adjacent to the 5′ end of the target. This result suggests that effectors of CLUST.099129 do not require a tracrRNA. CLUST.099129 effectors may thus be self-processing, allowing for ease in multiplexing.

### Example 6—Targeting of GFP by a CLUST.099129 Effector

[0419] This Example describes use of a fluorescence depletion assay (FDA) to measure activity of a CLUST.099129 effector.

[0420] In this assay, an active CRISPR system designed to target GFP binds and cleaves the double-stranded DNA region encoding GFP, resulting in depletion of GFP fluorescence. The FDA assay involves in vitro transcription and translation, allowing production of an RNP from a DNA template encoding a CLUST.099129 effector and a DNA template containing a pre-crRNA sequence under a T7 promoter with direct repeat (DR)-spacer-direct repeat (DR); the spacer targeted GFP. In the same one-pot reaction, GFP and RFP were also produced as both the target and the fluorescence reporter (FIG. 29A). The target GFP plasmid sequence is set forth in SEQ ID NO: 192, and the RFP plasmid sequence is set forth in SEQ ID NO: 193. GFP and RFP fluorescence values were measured every 20 min at 37° C. for 12 hr, using a TECAN Infinite F Plex plate reader. Since RFP was not targeted, its fluorescence was not affected and was therefore used as an internal signal control.

SEQ ID NO: 192
ccccttgtattactgtttatgtaagcagacaggatgcgtc
cggcgtagaggatcgagatctcCAAAAAATGGCTGTTTTT
GAAAAAAATTCTAAAGGTTGTTTTACGACAGACGATAACA
GGGTTgaaataattttgtttaactttaagaaggagATTTA
AATatgAAAATCGAAGAAGGTAAAGGTCACCATCACCATC
ACCACggatccatgacggcattgacggaaggtgcaaaact
gtttgagaaagagatcccgtatatcaccgaactggaaggc
gacgtcgaaggtatgaaatttatcattaaaggcgagggta
ccggtgacgcgaccacgggtaccattaaagcgaaatacat
ctgcactacgggcgacctgccggtcccgtgggcaaccctg
gtgagcaccctgagctacggtgttcagtgtttcgccaagt
acccgagccacatcaaggatttctttaagagcgccatgcc
ggaaggttatacccaagagcgtaccatcagcttcgaaggc
gacggcgtgtacaagacgcgtgctatggttacctacgaac
gcggttctatctacaatcgtgtcacgctgactggtgagaa
ctttaagaaagacggtcacattctgcgtaagaacgttgca
ttccaatgcccgccaagcattctgtatattctgcctgaca
ccgttaacaatggcatccgcgttgagttcaaccaggcgta
cgatattgaaggtgtgaccgaaaaactggttaccaaatgc
agccaaatgaatcgtccgttggcgggctccgcggcagtgc
atatcccgcgttatcatcacattacctaccacaccaaact
gagcaaagaccgcgacgagcgccgtgatcacatgtgtctg
gtagaggtcgtgaaagcggttgatctggacacgtatcagT
AATAAaaagcccgaaaggaagctgagttggctgctgccac
cgctgagcaataactagcataaccccttggggcctctaaa
cgggtcttgaggggttttttgctgaaaggaggaactatat
ccggCTTCCTCGCTCACTGACTCGCTGCGCTCGGTCGTTC
GGCTGCGGCGAGCGGTATCAGCTCACTCAAAGGCGGTAAT
ACGGTTATCCACAGAATCAGGGGATAACGCAGGAAAGAAC
ATGTGAGCAAAAGGCCAGCAAAAGGCCAGGAACCGTAAAA
AGGCCGCGTTGCTGGCGTTTTTCCATAGGCTCCGCCCCCC
TGACGAGCATCACAAAAATCGACGCTCAAGTCAGAGGTGG
CGAAACCCGACAGGACTATAAAGATACCAGGCGTTTCCCC
CTGGAAGCTCCCTCGTGCGCTCTCCTGTTCCGACCCTGCC
GCTTACCGGATACCTGTCCGCCTTTCTCCCTTCGGGAAGC
GTGGCGCTTTCTCATAGCTCACGCTGTAGGTATCTCAGTT
CGGTGTAGGTCGTTCGCTCCAAGCTGGGCTGTGTGCACGA
ACCCCCCGTTCAGCCCGACCGCTGCGCCTTATCCGGTAAC
TATCGTCTTGAGTCCAACCCGGTAAGACACGACTTATCGC
CACTGGCAGCAGCCACTGGTAACAGGATTAGCAGAGCGAG
GTATGTAGGCGGTGCTACAGAGTTCTTGAAGTGGTGGCCT
AACTACGGCTACACTAGAAGAACAGTATTTGGTATCTGCG
CTCTGCTGAAGCCAGTTACCTTCGGAAAAAGAGTTGGTAG
CTCTTGATCCGGCAAACAAACCACCGCTGGTAGCGGTGGT
TTTTTTGTTTGCAAGCAGCAGATTACGCGCAGAAAAAAAG
GATCTCAAGAAGATCCTTTGATCTTTTCTACGGGGTCTGA
CGCTCAGTGGAACGAAAACTCACGggtggcacttttcggg
gaaatgtgcgcggaacccctatttgtttatttttctaaat
acattcaaatatgtatccgctcatgaattaattcttagaa
aaactcatcgagcatcaaatgaaactgcaatttattcata
tcaggattatcaataccatatttttgaaaaagccgtttct
gtaatgaaggagaaaactcaccgaggcagttccataggat
ggcaagatcctggtatcggtctgcgattccgactcgtcca
acatcaatacaacctattaatttcccctcgtcaaaaataa
ggttatcaagtgagaaatcaccatgagtgacgactgaatc
cggtgagaatggcaaaagtttatgcatttctttccagact
tgttcaacaggccagccattacgctcgtcatcaaaatcac
tcgcatcaaccaaaccgttattcattcgtgattgcgcctg
agcgagacgaaatacgcgatcgctgttaaaaggacaatta
caaacaggaatcgaatgcaaccggcgcaggaacactgcca
gcgcatcaacaatattttcacctgaatcaggatattcttc
taatacctggaatgctgttttcccggggatcgcagtggtg
agtaaccatgcatcatcaggagtacggataaaatgcttga
tggtcggaagaggcataaattccgtcagccagtttagtct
gaccatctcatctgtaacatcattggcaacgctacctttg
ccatgtttcagaaacaactctggcgcatcgggcttcccat
acaatcgatagattgtcgcacctgattgcccgacattatc
gcgagcccatttatacccatataaatcagcatccatgttg
gaatttaatcgcggcctagagcaagacgtttcccgttgaa
tatggctcataaca
SEQ ID NO: 193
ccccttgtattactgtttatgtaagcagacaggatgcgtc
cggcgtagaggatcgagatctcCAAAAAATGGCTGTTTTT
GAAAAAAATTCTAAAGGTTGTTTTACGACAGACGATAACA
GGGTTgaaataattttgtttaactttaagaaggagATTTA
AATatgAAAATCGAAGAAGGTAAAGGTCACCATCACCATC
ACCACggatccaTGGTCAGCAAGGGGGAGGAAGACAATAT
GGCTATTATCAAGGAATTCATGCGCTTCAAGGTGCATATG
GAAGGAAGCGTGAATGGACACGAATTCGAGATCGAAGGCG
AGGGGGAGGGTCGCCCTTATGAAGGCACACAAACAGCTAA
ACTGAAAGTGACGAAGGGAGGGCCGCTTCCCTTCGCTTGG
GACATTCTTTCACCCCAGTTCATGTATGGTTCAAAGGCTT
ATGTCAAGCACCCGGCGGACATTCCAGACTACTTAAAATT
GTCGTTCCCCGAGGGGTTTAAATGGGAACGCGTTATGAAT
TTCGAGGATGGGGGAGTCGTAACGGTTACCCAGGACAGTA
GCCTGCAGGATGGCGAGTTCATCTACAAAGTGAAATTGCG
CGGGACGAACTTCCCTAGCGATGGGCCAGTCATGCAGAAG
AAAACGATGGGATGGGAAGCGTCATCCGAGCGCATGTATC
CTGAAGATGGTGCTTTAAAAGGTGAGATCAAGCAGCGTTT
GAAACTGAAGGACGGGGGCCATTATGATGCTGAAGTTAAA
ACGACATATAAGGCCAAGAAGCCAGTTCAACTGCCAGGGG
CTTATAATGTTAATATTAAATTAGACATTACGAGCCATAA
TGAAGATTACACGATTGTCGAGCAATACGAGCGCGCAGAA
GGACGCCACTCAACGGGGGGCATGGACGAGCTGTACAAGT
AAaaagcccgaaaggaagctgagttggctgctgccaccgc
tgagcaataactagcataaccccttggggcctctaaacgg
gtcttgaggggttttttgctgaaaggaggaactatatccg
gCTTCCTCGCTCACTGACTCGCTGCGCTCGGTCGTTCGGC
TGCGGCGAGCGGTATCAGCTCACTCAAAGGCGGTAATACG
GTTATCCACAGAATCAGGGGATAACGCAGGAAAGAACATG
TGAGCAAAAGGCCAGCAAAAGGCCAGGAACCGTAAAAAGG
CCGCGTTGCTGGCGTTTTTCCATAGGCTCCGCCCCCCTGA
CGAGCATCACAAAAATCGACGCTCAAGTCAGAGGTGGCGA
AACCCGACAGGACTATAAAGATACCAGGCGTTTCCCCCTG
GAAGCTCCCTCGTGCGCTCTCCTGTTCCGACCCTGCCGCT
TACCGGATACCTGTCCGCCTTTCTCCCTTCGGGAAGCGTG
GCGCTTTCTCATAGCTCACGCTGTAGGTATCTCAGTTCGG
TGTAGGTCGTTCGCTCCAAGCTGGGCTGTGTGCACGAACC
CCCCGTTCAGCCCGACCGCTGCGCCTTATCCGGTAACTAT
CGTCTTGAGTCCAACCCGGTAAGACACGACTTATCGCCAC
TGGCAGCAGCCACTGGTAACAGGATTAGCAGAGCGAGGTA
TGTAGGCGGTGCTACAGAGTTCTTGAAGTGGTGGCCTAAC
TACGGCTACACTAGAAGAACAGTATTTGGTATCTGCGCTC
TGCTGAAGCCAGTTACCTTCGGAAAAAGAGTTGGTAGCTC
TTGATCCGGCAAACAAACCACCGCTGGTAGCGGTGGTTTT
TTTGTTTGCAAGCAGCAGATTACGCGCAGAAAAAAAGGAT
CTCAAGAAGATCCTTTGATCTTTTCTACGGGGTCTGACGC
TCAGTGGAACGAAAACTCACGggtggcacttttcggggaa
atgtgcgcggaacccctatttgtttatttttctaaataca
ttcaaatatgtatccgctcatgaattaattcttagaaaaa
ctcatcgagcatcaaatgaaactgcaatttattcatatca
ggattatcaataccatatttttgaaaaagccgtttctgta
atgaaggagaaaactcaccgaggcagttccataggatggc
aagatcctggtatcggtctgcgattccgactcgtccaaca
tcaatacaacctattaatttcccctcgtcaaaaataaggt
tatcaagtgagaaatcaccatgagtgacgactgaatccgg
tgagaatggcaaaagtttatgcatttctttccagacttgt
tcaacaggccagccattacgctcgtcatcaaaatcactcg
catcaaccaaaccgttattcattcgtgattgcgcctgagc
gagacgaaatacgcgatcgctgttaaaaggacaattacaa
acaggaatcgaatgcaaccggcgcaggaacactgccagcg
catcaacaatattttcacctgaatcaggatattcttctaa
tacctggaatgctgttttcccggggatcgcagtggtgagt
aaccatgcatcatcaggagtacggataaaatgcttgatgg
tcggaagaggcataaattccgtcagccagtttagtctgac
catctcatctgtaacatcattggcaacgctacctttgcca
tgtttcagaaacaactctggcgcatcgggcttcccataca
atcgatagattgtcgcacctgattgcccgacattatcgcg
agcccatttatacccatata aatcagcatccatgttgga
atttaatcgcggcctagagcaagacgtttcccgttgaata
tggctcataaca

[0421] 5 GFP targets (plus 1 non-target) were designed for the effector of SEQ ID NO: 101. RNA guide sequences, target sequences, and the non-target control sequences used for the FDA assay are listed in Table 13. A 5′-GTN-3′ PAM was used for the target sequences.

TABLE 13
RNA guide and Target Sequences for FDA Assay.

| Target | Mature crRNA Sequence | Target Sequence |
|---|---|---|
| Target 1 | ATAACTGTTCAGCGGAGAAGCCGCTGAAACa | aaacaacctttagaatttttttca |
| | aacaacctttagaatttttttca (SEQ ID | (SEQ ID NO: 175) |
| | NO: 194) | |
| Target 2 | ATAACTGTTCAGCGGAGAAGCCGCTGAAACg | gaactcaacgcggatgccattgtt |
| | aactcaacgcggatgccattgtt (SEQ ID | (SEQ ID NO: 176) |
| | NO: 195) | |
| Target 3 | ATAACTGTTCAGCGGAGAAGCCGCTGAAACg | gctcgggtacttggcgaaacactg |
| | ctcgggtacttggcgaaacactg (SEQ ID | (SEQ ID NO: 177) |
| | NO: 196) | |
| Target 4 | ATAACTGTTCAGCGGAGAAGCCGCTGAAACt | tacaagacgcgtgctatggttacc |
| | acaagacgcgtgctatggttacc (SEQ ID | (SEQ ID NO: 178) |
| | NO: 197) | |
| Target 5 | ATAACTGTTCAGCGGAGAAGCCGCTGAAACa | aacaatggcatccgcgttgagttc |
| | acaatggcatccgcgttgagttc (SEQ ID | (SEQ ID NO: 179) |
| | NO: 198) | |
| Non-Target 4 | ATAACTGTTCAGCGGAGAAGCCGCTGAAACa | |
| | ggtgctacatttgaagagataaa (SEQ ID | |
| | NO: 199) | |

[0422] GFP signal was normalized to RFP signal, then the average fluorescence of three technical replicates was taken at each time point. GFP fluorescence depletion was then calculated by dividing the GFP signal of an effector incubated with a non-GFP targeting RNA guide (which instead targets a kanamycin resistance gene and does not deplete GFP signal) by the GFP signal of an effector incubated with a GFP targeting RNA guide. The resulting value is referred to as “Depletion” in FIG. 29B.

[0423] A Depletion of one or approximately one indicated that there was little to no difference in GFP depletion with respect to a non-GFP targeting pre-crRNA and a GFP targeting pre-crRNA (e.g., 10 RFU/10 RFU=1). A Depletion of greater than one indicated that there was a difference in GFP depletion with respect to a non-GFP targeting pre-crRNA and a GFP targeting pre-crRNA (e.g., 10 RFU/5 RFU=2). Depletion of the GFP signal indicated that the effector formed a functional RNP and interfered with the production of GFP by introducing double-stranded DNA cleavage within the GFP coding region. The extent of the GFP depletion was largely correlated to the specific activity of a CLUST.099129 effector.

[0424] FIG. 29B shows depletion curves for RNPs formed by the effector of SEQ ID NO: 101, measured every 20 minutes for each of the GFP targets (Targets 1-5). At each target, the depletion values for RNPs formed with the effector of SEQ ID NO: 101 were greater than one.

[0425] This indicated that the CLUST.099129 effector formed a functional RNP capable of interfering with the production of GFP.

### Example 7—Identification of Components of CLUST.342201 CRISPR-Cas Systems

[0426] This protein family was identified using the computational methods described above. The CLUST.342201 system comprises single effectors associated with CRISPR systems found in uncultured metagenomic sequences collected from wastewater, freshwater, marine, lake sediment, gut, microbial mat, and soil environments (TABLE 16). Exemplary CLUST.342201 effectors include those shown in TABLES 16 and 17, below. Examples of direct repeat sequences and spacer lengths for these systems are shown in TABLE 18. Optionally, the system includes a tracrRNA that is contained within a non-coding sequence listed in TABLE 19.

TABLE 16
Representative CLUST.342201 Effector Proteins

| | | # | effector | SEQ |
|---|---|---|---|---|
| source | effector accession | spacers | size | ID NO |
| wastewater | 3300006417\|Ga0069787_10357475_9\|M | 3 | 387 | 301 |
| metagenome | | | | |
| aquatic-freshwater | 3300022602\|Ga0248169_134333_3\|P | 5 | 345 | 302 |
| aquatic-freshwater | 3300022602\|Ga0248169_134333_4\|M | 5 | 369 | 303 |
| aquatic-freshwater- | 3300025018\|Ga0210043_1027795_3\|M | 2 | 381 | 304 |
| aquifer | | | | |
| aquatic-freshwater- | 3300020198\|Ga0194120_10001032_39\|P | 4 | 391 | 305 |
| freshwater lake | | | | |
| aquatic-freshwater- | 3300014060\|Ga0119967_10019787_9\|M | 5 | 381 | 306 |
| freshwater metagenome | | | | |
| aquatic-freshwater- | 3300020180\|Ga0163155_10006838_6\|M | 2 | 398 | 307 |
| freshwater microbial | | | | |
| mat | | | | |
| aquatic-freshwater- | 3300020180\|Ga0163155_10006838_8\|P | 2 | 419 | 308 |
| freshwater microbial | | | | |
| mat | | | | |
| aquatic-freshwater- | 3300020219\|Ga0163146_10008638_12\|M | 2 | 332 | 309 |
| freshwater microbial | | | | |
| mat | | | | |
| aquatic-freshwater- | 3300020219\|Ga0163146_10008638_11\|P | 2 | 398 | 310 |
| freshwater microbial | | | | |
| mat | | | | |
| aquatic-freshwater- | 3300001380\|JGI1356J14229_10025169_2\|P | 2 | 297 | 311 |
| groundwater | | | | |
| aquatic-freshwater- | 3300014613\|Ga0180008_1001166_14\|P | 2 | 382 | 312 |
| groundwater | | | | |
| aquatic-freshwater- | 3300014613\|Ga0180008_1001166_12\|M | 2 | 374 | 313 |
| groundwater | | | | |
| aquatic-freshwater- | 3300014656\|Ga0180007_10002258_14\|P | 2 | 382 | 314 |
| groundwater | | | | |
| aquatic-freshwater- | 3300014656\|Ga0180007_10002258_12\|M | 2 | 374 | 315 |
| groundwater | | | | |
| aquatic-freshwater- | 3300013127\|Ga0172365_10076875_1\|P | 7 | 398 | 316 |
| sediment | | | | |
| aquatic-marine-aqueous | 3300007960\|Ga0099850_1017825_5\|M | 4 | 365 | 317 |
| aquatic-marine-aqueous | 3300025687\|Ga0208019_1031224_1\|P | 3 | 389 | 318 |
| aquatic-marine-aqueous | 3300025687\|Ga0208019_1031224_1\|M | 3 | 365 | 319 |
| aquatic-non marine | 3300017963\|Ga0180437_10001136_84\|M | 3 | 351 | 320 |
| saline and alkaline - | | | | |
| hypersaline lake | | | | |
| sediment | | | | |
| aquatic-non marine | 3300017963\|Ga0180437_10001136_87\|P | 3 | 408 | 321 |
| saline and alkaline - | | | | |
| hypersaline lake | | | | |
| sediment | | | | |
| aquatic-non marine | 3300017971\|Ga0180438_10021976_13\|P | 2 | 408 | 322 |
| saline and alkaline - | | | | |
| hypersaline lake | | | | |
| sediment | | | | |
| aquatic-non marine | 3300017971\|Ga0180438_10021976_11\|M | 2 | 360 | 323 |
| saline and alkaline - | | | | |
| hypersaline lake | | | | |
| sediment | | | | |
| aquatic-non marine | 3300025586\|Ga0207996_1000986_11\|P | 4 | 399 | 324 |
| saline and alkaline- | | | | |
| saline lake | | | | |
| aquatic-non marine | 3300025642\|Ga0208648_1003027_2\|M | 2 | 399 | 325 |
| saline and alkaline- | | | | |
| saline lake | | | | |
| aquatic-non marine | 3300028299\|Ga0268276_1017374_5\|P | 2 | 403 | 326 |
| saline and alkaline- | | | | |
| saline water | | | | |
| aquatic-non marine | 3300028299\|Ga0268276_1017374_4\|M | 2 | 384 | 327 |
| saline and alkaline- | | | | |
| saline water | | | | |
| gut metagenome | SRR1221442_902393_36\|P | 3 | 303 | 328 |
| mammals-digestive | 3300001598\|EMG_10002624_36\|P | 3 | 303 | 329 |
| system-asian elephant | | | | |
| fecal-elephas maximus | | | | |
| microbial mat | ORBV01001191_65\|M | 2 | 332 | 330 |
| metagenome | | | | |
| microbial mat | ORBV01001191_63\|P | 2 | 398 | 331 |
| metagenome | | | | |
| seawater metagenome | OVSM01005865_8\|M | 2 | 331 | 332 |
| seawater metagenome | OVXX01005191_2\|P | 2 | 331 | 333 |
| terrestrial-soil-corn, | 3300005549\|Ga0070704_100000680_37\|P | 3 | 608 | 334 |
| switchgrass and | | | | |
| miscanthus rhizosphere | | | | |
| terrestrial-soil-corn, | 3300005549\|Ga0070704_100000680_28\|M | 3 | 617 | 335 |
| switchgrass and | | | | |
| miscanthus rhizosphere | | | | |
| terrestrial-soil- | 3300010400\|Ga0134122_10000002_228\|P | 5 | 602 | 336 |
| terrestrial soil | | | | |
| terrestrial-soil-vadose | 3300009089\|Ga0099828_10012481_2\|M | 4 | 341 | 337 |
| zone soil | | | | |
| terrestrial-soil-vadose | 3300012201\|Ga0137365_10010044_6\|P | 4 | 573 | 338 |
| zone soil | | | | |
| terrestrial-soil-vadose | 3300012356\|Ga0137371_10006599_2\|M | 4 | 573 | 339 |
| zone soil | | | | |
| wastewater metagenome | 3300006417_501592_1\|M | 6 | 387 | 340 |
| wastewater metagenome | SRR6837571_682758_2\|M | 6 | 387 | 341 |

TABLE 171
Amino Acid Sequences of Representative CLUST.342201 Effector Proteins

>3300006417|Ga0069787_10357475_9|M
[wastewater metagenome]
MLKAHVIRLNPTKEQETYFWRCAGVARFTWNWALAELNAAYEKGERPAVGSLKLEFNRLRNEEGFAPFVGEVQSYAYQQAFGDLQK
ALSSYHDFRKRGMLKPPTSWKGRKDHKPFGWPRFKVRNRSTPAFYLANNGGLRMNGHQVTIQRCPGGPVNMAEPLRFTGKVMGGRV
RYRAGHWYLTVQVDVPVEPDPAHTGPAVGLDVGIKVLAFTSDGVIYDNPKALAHYQRKLRLLQRSLSRQTRGGSNYRKTQAKIARL
HDRIANIRKHALHQVSHEITRDYGLIGLEDLNVSGMLKNGKLARSISDVALGELRRQIEYKADWRGSRVMIVSRWFPSSKTCNDCG
YVMADMLLSVRWWQCPACGAEHDRDGNAAVNIRNEAVKMAGAA (SEQ ID NO: 301)
>3300022602|Ga0248169_134333_3|P
[aquatic-freshwater]
MNSQSLLAALLDVDNAFKRFFTQGAGYPKFASKYDPWQSFSCPQHVRLEGGQVHLPKLGLMDLVLHRQIPSDGTIKNCVIKRSPTG
KYQISLLIERNINEVICAPVIKDQSIGIDLGIKTFAVGSDGYSIQNPRFLSRQLPRLKTEQRKFARMQKDSNNRAKQKKVVAKIHE
DVANARHHFIHQESYRLAVKNHATTVMMETLMIKNMVRNHKLARHITDCGWGMFEKALEYKLAERGKNLIKIDTFLPSTKKCRICK
TKNTAMTLKDRVFVCGSCGHIEDRDLHAAQNVRDFGYEQYTRSLGTCETVKRSPVSISVGADEFAKGSKKFGTGRLEEAPAIAALA
A (SEQ ID NO: 302)
>3300022602|Ga0248169_134333_4|M
[aquatic-freshwater]
MSRRQLQDHLVKKKKKSKFTWLNEVNSQSLLAALLDVDNAFKRFFTQGAGYPKFASKYDPWQSFSCPQHVRLEGGQVHLPKLGLMD
LVLHRQIPSDGTIKNCVIKRSPTGKYQISLLIERNINEVICAPVIKDQSIGIDLGIKTFAVGSDGYSIQNPRFLSRQLPRLKTEQR
KFARMQKDSNNRAKQKKVVAKIHEDVANARHHFIHQESYRLAVKNHATTVMMETLMIKNMVRNHKLARHITDCGWGMFEKALEYKL
AERGKNLIKIDTFLPSTKKCRICKTKNTAMTLKDRVFVCGSCGHIEDRDLHAAQNVRDFGYEQYTRSLGTCETVKRSPVSISVGAD
EFAKGSKKFGTGRLEEAPAIAALAA (SEQ ID NO: 303)
>3300025018|Ga0210043_1027795_3|M
[aquatic-freshwater-aquifer]
MNRAHRIRLNPTAEQAAYFWRCAGVARFTWNWALGEYNAALARGEKPSLTALKLEFNRRRSEDRFAPWVGEVQSYAYQYAFQDLQT
AISRYHERRQADKLKPPAGWKPRKDGKPFGWPRFKARDNTTPAFGLANNGGIRCTGHQAQIQRCPGPVNMAEELRFDGRILSGRVT
YIAGHWYLAVAIELPDPQPEPLPGRVGVDLGIKSLAVTSDGVIYENPKHLRGSQRKLAHLQREFSRRQKGSRNWAKTKAKITRLHA
RIGNQRREVLHEMTTDLVRTYGTVVVEDLNVSGMLQNHHLAQAVSDASFGEIRRQLEYKASAFGSKVVIADRWYPSSKTCNDCGQI
VELTLAERTWTCPRCGVIHDRDLNAARNLRDYSAVTG (SEQ ID NO: 304)
>3300020198|Ga0194120_10001032_39|P
[aquatic-freshwater-freshwater lake]
MRVNKVFRYELKPNEVQKQIMAQHAGSARYAYNWALEKINSKVFNTTNDKKLHALWRQYRPGWWDFSVSKCVPQEALVNLSNSFKN
HRVNPGYFKDPVFKKKFIHDSFRLTGTVKVFANHVQLPILGKIRLKEVIDKYLRSLKSKNTKKLSTKDYKKTDRILSATVTRTADR
WYVSILVDIDIPEITDIPTGVVGIDFGIKKFLTLSNGLKFDHPKALKKHLKLLKRRQKQKDKKQKGSHNRLKSSLKLARLHAKIAN
IRRDYLNKITTWLARSKSVIVLENLNLKGMGKWHALAQALADAGFGLFKSMLQYKCQWYGSKLILADRWYGSSKTCSNCGWYYKDL
SLKERSWICKSCNTDHDRDLNAAINLKKIGVLSHSRGIYACGDSYAG (SEQ ID NO: 305)
>3300014060|Ga0119967_10019787_9|M
[aquatic-freshwater-freshwater metagenome]
MNRAHRIRLNPTAEQAAYFWRCAGVARFTWNWALGEYNAALARGEKPSLTALKLEFNRRRSEDRFAPWVGEVQSYAYQYAFQDLQT
AISRYHERRQADKLKPPAGWKPRKDGKPFGWPRFKARDNTTPAFGLANNGGIRCTGHQAQIQRCPGPVNMAEELRFDGRILSGRVT
YIAGHWYLAVAIELPDPQPEPLPGRVGVDLGIKSLAVTSDGVIYENPKHLRGSQRKLAHLQREFSRRQKGSHNWAKTKAKITRLHA
RIGNQRREVLHEMTTDLVRTYGTVVVEDLNVSGMLQNHHLAQAVSDASFGEIRRQLEYKASAFGSKVVIADRWYPSSKTCNDCGQI
VELTLAERTWTCPRCGVIHDRDLNAARNLRDYSAVTG (SEQ ID NO: 306)
>3300020180|Ga0163155_10006838_6|M
[aquatic-freshwater-freshwater microbial mat]
MATVRYRYRLYPTPAQRVALARTFGAVRFVWNQELARSQIHDAKYQGFSAASRRLTAAKKTTDLAWLNAISCVPIQQSLRNLDVSY
RNFFRGCKSKGPRRGYPRFKSKYDEQSAEYTRSGFKVEHGKLCLAKLGSIEVRWSRLLPSIPKTATVKLDATGRYFVSFTVEVNAQ
PLVGGTPVGIDLGIKCFAALSTGEMVQAPSYKRRERKIAHVQRELARRKNGSRRRAVTKKKLARLHAKISDTRRDFLDKLSTRLVR
SHDVIVVEDLNVSGMVKNHHLARSISRQGWRAFRTMLESKCTRYGRELQVVNRWTPTSQICSTCGHRWGRLDLSVRQVTCEGCGAA
HDRDVNAAKNIVAAGQVETKNGRGGHVRRMVPLGTCAVLDEASTSGPTPESSAF (SEQ ID NO: 307)
>3300020180|Ga0163155_10006838_8|P
[aquatic-freshwater-freshwater microbial mat]
MTTAIERLHGHVLQSMVSCRPMATVRYRYRLYPTPAQRVALARTFGAVRFVWNQELARSQIHDAKYQGFSAASRRLTAAKKTTDLA
WLNAISCVPIQQSLRNLDVSYRNFFRGCKSKGPRRGYPRFKSKYDEQSAEYTRSGFKVEHGKLCLAKLGSIEVRWSRLLPSIPKTA
TVKLDATGRYFVSFTVEVNAQPLVGGTPVGIDLGIKCFAALSTGEMVQAPSYKRRERKIAHVQRELARRKNGSRRRAVTKKKLARL
HAKISDTRRDFLDKLSTRLVRSHDVIVVEDLNVSGMVKNHHLARSISRQGWRAFRTMLESKCTRYGRELQVVNRWTPTSQICSTCG
HRWGRLDLSVRQVTCEGCGAAHDRDVNAAKNIVAAGQVETKNGRGGHVRRMVPLGTCAVLDEASTSGPTPESSAF (SEQ ID
NO: 308)
>3300020219|Ga0163146_10008638_12|M
[aquatic-freshwater-freshwater microbial mat]
MNDVSSVPVQQSIRNLDVAFRRFFNGLKGKGPKVGFPTWKRKDGKQSAEFTRSGFKLQRGKLYIAKVGDVDVRWSRALPSVPKTAT
VTLDAAGRYHVSFTVEKTDVALNGGSPVGVDLGIKTFAALSTGELVHAPDTKRLERRIGKAQRGLSRCRKGSARRGRAKLRVAKLH
AVLADTRRDFLEKFSTRLVREHSLIALEDLNVAGMAKNHCLARAVNRQGWRMFRTMVQSKCERYGREVRIVGRWEPTSQVCSGCGH
RWGRVGLGVRTIACEGCGEVHDRDVNAAKNVVAAGLADTENGRGEWVSRVVSMGTGVPFVEASTAGASPGISAL (SEQ ID NO:
309)
>3300020219|Ga0163146_10008638_11|P
[aquatic-freshwater-freshwater microbial mat]
MASLRYSYRLYPTTEQRRALAQTFGCVRVAWNDALARSQVSGAKYPGFAATSRLLTESKKSPERAWLNDVSSVPVQQSIRNLDVAF
RRFFNGLKGKGPKVGFPTWKRKDGKQSAEFTRSGFKLQRGKLYIAKVGDVDVRWSRALPSVPKTATVTLDAAGRYHVSFTVEKTDV
ALNGGSPVGVDLGIKTFAALSTGELVHAPDTKRLERRIGKAQRGLSRCRKGSARRGRAKLRVAKLHAVLADTRRDFLEKFSTRLVR
EHSLIALEDLNVAGMAKNHCLARAVNRQGWRMFRTMVQSKCERYGREVRIVGRWEPTSQVCSGCGHRWGRVGLGVRTIACEGCGEV
HDRDVNAAKNVVAAGLADTENGRGEWVSRVVSMGTGVPFVEASTAGASPGISAL (SEQ ID NO: 310)
>3300001380|JGI1356J14229_10025169_2|P
[aquatic-freshwater-groundwater]
MKKQGNKAGFPRFKPFEKMKSLHYPQYGNGFFLDKTLEASPFGKIQIVRHREIKGRIKTLSIKREASGKWFACISADAPLIIKFSN
NQPKVGIDLGLETFATLSNGEKVQNPRHIKKYEKRLAFLQRKRSRKTKGSRNRKKANEIAARQYLKLKNTRLDFLHKLSHNLVNSY
SLICLEDLACQEMAENRFGKQINDAGWGRFATMIQYKAESAGAEVIFVNPENTSKTCCICGNLQDMPLNERAYNCKSCGNSLDRDI
NAALNILTRATAGMAGSNASGDETIIPSLKEEAHAFTRG (SEQ ID NO: 311)
>3300014613|Ga0180008_1001166_14|P
[aquatic-freshwater-groundwater]
MHRAHRIRLNPTPEQEKYLWRCAGVARFTWNWALAAYNDTLVRGEKPSIAKLKVEFNRQRAEEAFAPWVGEVQSYAYQYAFQDLRT
AINRYHELRKADKLKPRAGWKPRKDGRPFGWPRFKARALTTPAFGLANNGGVHCAGNLAYLQRCPSPINMAEELRFTGRILSGHVS
YTGGHWHLSVSLDLPDPQPEPLPGRVGVDLGIKSLAVTSDGVVYENPKHLRASQRKLARLQRELARRTKGGKNRAKTQTKIARLHE
RIANQRRETLHEMTTDLVSRYGTVVVEDLNVSGMLSNHRLALAVSDASFGEIRRQLEYKAPAHGSQVLVANQWFPSSKTCNDCGCV
TALTLSDRVWTCPNCGVVHDRDINAAQNLRDYQPVSVA (SEQ ID NO: 312)
>3300014613|Ga0180008_1001166_12|M
[aquatic-freshwater-groundwater]
MNPTPEQEKYLWRCAGVARFTWNWALAAYNDTLVRGEKPSIAKLKVEFNRQRAEEAFAPWVGEVQSYAYQYAFQDLRTAINRYHEL
RKADKLKPRAGWKPRKDGRPFGWPRFKARALTTPAFGLANNGGVHCAGNLAYLQRCPSPINMAEELRFTGRILSGHVSYTGGHWHL
SVSLDLPDPQPEPLPGRVGVDLGIKSLAVTSDGVVYENPKHLRASQRKLARLQRELARRTKGGKNRAKTQTKIARLHERIANQRRE
TLHEMTTDLVSRYGTVVVEDLNVSGMLSNHRLALAVSDASFGEIRRQLEYKAPAHGSQVLVANQWFPSSKTCNDCGCVTALTLSDR
VWTCPNCGVVHDRDINAAQNLRDYQPVSVA (SEQ ID NO: 313)
>3300014656|Ga0180007_10002258_14|P
[aquatic-freshwater-groundwater]
MHRAHRIRLNPTPEQEKYLWRCAGVARFTWNWALAAYNDTLVRGEKPSIAKLKVEFNRQRAEEAFAPWVGEVQSYAYQYAFQDLRT
AINRYHELRKADKLKPRAGWKPRKDGRPFGWPRFKARALTTPAFGLANNGGVHCAGNLAYLQRCPSPINMAEELRFTGRILSGHVS
YTGGHWHLSVSLDLPDPQPEPLPGRVGVDLGIKSLAVTSDGVVYENPKHLRASQRKLARLQRELARRTKGGKNRAKTQTKIARLHE
RIANQRRETLHEMTTDLVSRYGTVVVEDLNVSGMLSNHRLALAVSDASFGEIRRQLEYKAPAHGSQVLVANQWFPSSKTCNDCGCV
TALTLSDRVWTCPNCGVVHDRDINAAQNLRDYQPVSVA (SEQ ID NO: 314)
>3300014656|Ga0180007_10002258_12|M
[aquatic-freshwater-groundwater]
MNPTPEQEKYLWRCAGVARFTWNWALAAYNDTLVRGEKPSIAKLKVEFNRQRAEEAFAPWVGEVQSYAYQYAFQDLRTAINRYHEL
RKADKLKPRAGWKPRKDGRPFGWPRFKARALTTPAFGLANNGGVHCAGNLAYLQRCPSPINMAEELRFTGRILSGHVSYTGGHWHL
SVSLDLPDPQPEPLPGRVGVDLGIKSLAVTSDGVVYENPKHLRASQRKLARLQRELARRTKGGKNRAKTQTKIARLHERIANQRRE
TLHEMTTDLVSRYGTVVVEDLNVSGMLSNHRLALAVSDASFGEIRRQLEYKAPAHGSQVLVANQWFPSSKTCNDCGCVTALTLSDR
VWTCPNCGVVHDRDINAAQNLRDYQPVSVA (SEQ ID NO: 315)
>3300013127|Ga0172365_10076875_1|P
[aquatic-freshwater-sediment]
MTAISISHKIALEPTKLQAAHFALCVGASRKAYNWALDTWNRQWDDGRKPKAADIRKLFNEVKWHDDTLRWMTGARNFVADRSIQN
LGEAWKKHFRAPAQWRKPTFHSTRIHRSFYVSIGNRKAPNIQVQGRRVRLCLEGTNYPEGQARIGWVKMREELRWDGRIESATISR
DEKRWYISFSCSGAENYPHRAGEGLLGVAIGFNTVALSNGTVFDQRRPLERYLVKKQRLSRSLSRKQSRLWNKKTKEVQRQSSANW
EKARARLARLDDRIANLRSDFIHRVTTDIVRTGKALVIEAVNVQRLLKDGRTARAASDVSFFEWKRQLQYKTQVAGGSLQQVPTSI
DLYQVCSRCGRRNYDARKYGKRFVCPHCGLDIENGVNIASNLATVKSAESQACG (SEQ ID NO: 316)
>3300007960|Ga0099850_1017825_5|M
[aquatic-marine-aqueous]
MSRFTWNWALAAYNDGVPFSYLKTEFNRLRSEDGFAPFVSEVQSYAYQQAFNDLNAALSRYFKFQKEGRLKPPAGWKPRKDRKPFG
WPRFKSRDKSTPSFYLANNGGMRFDGHGVVIQKCPGGPVNMAEPLRFDGKIMGGRVSYTGGYWYLAVSVQMGDPEPTADTSAAVGV
DMGIKYRAVTSDGVIYNNPKSLAQNLRKLRKLQRSLSRMRDAAKAEGRKLGESNNYQKRKREIAKLHATIANIRREHAHEMTTELV
REYGVVGVEDLNIRGMVKNRRLSRAVMDASMYQVRTQLDYKLKTSGGELVVVDRWYASSKTCNACGEKVDALPLSIRQWACPSCGA
EHDRDGNAAKNIRDEALRMRG (SEQ ID NO: 317)
>3300025687|Ga0208019_1031224_1|P
[aquatic-marine-aqueous]
MNRAHRIRLNPTTEQEEYFWQCAGVSRFTWNWALAAYNDGVPFSYLKTEFNRLRSEDGFAPFVSEVQSYAYQQAFNDLNAALSRYF
KFQKEGRLKPPAGWKPRKDRKPFGWPRFKSRDKSTPSFYLANNGGMRFDGHGVVIQKCPGGPVNMAEPLRFDGKIMGGRVSYTGGY
WYLAVSVQMDDPEPTADTSAAVGVDMGIKYRAVTSDGVIYNNPKSLAQNLRKLRKLQRSLSRMRDAAKAEGRKLGESNNYQKRKRE
IAKLHATIANIRREHAHEMTTELVREYGVVGVEDLNIRGMVKNRRLSRAVMDASMYQVRTQLDYKLKTSGGELVVVDRWYASSKTC
NACGEKVDALPLSIRQWACPSCGAEHDRDGNAAKNIRDEALRMRG (SEQ ID NO: 318)
>3300025687|Ga0208019_1031224_1|M
[aquatic-marine-aqueous]
MSRFTWNWALAAYNDGVPFSYLKTEFNRLRSEDGFAPFVSEVQSYAYQQAFNDLNAALSRYFKFQKEGRLKPPAGWKPRKDRKPFG
WPRFKSRDKSTPSFYLANNGGMRFDGHGVVIQKCPGGPVNMAEPLRFDGKIMGGRVSYTGGYWYLAVSVQMDDPEPTADTSAAVGV
DMGIKYRAVTSDGVIYNNPKSLAQNLRKLRKLQRSLSRMRDAAKAEGRKLGESNNYQKRKREIAKLHATIANIRREHAHEMTTELV
REYGVVGVEDLNIRGMVKNRRLSRAVMDASMYQVRTQLDYKLKTSGGELVVVDRWYASSKTCNACGEKVDALPLSIRQWACPSCGA
EHDRDGNAAKNIRDEALRMRG (SEQ ID NO: 319)
>3300017963|Ga0180437_10001136_84|M
[aquatic-non marine saline and alkaline-hypersaline lake sediment]
MDETCPELLWVRDELGMNKQIQQVPCEDLEKAWKRFFDWCRARKKGNVGLRRVGPPKFKSSRWMVGMSFGAKQGVEHDPETRKVRI
PSIGWIRHFEKDVDFSNDKIKCCRVVWRASGWYCSLSMDNDIEIKSPLKWKKRKTHSVHLGIRHYAVLSDGNNVDHPRNLERNLDR
LSKLCREWSRKKKGSRRWRIWRDRVRRVHEKIANCRKDFIHKMTDDLLKKYPCLISEKWSISDMVENEKTKRKRRKIKAGRRKPGS
RMMEKLLHRGIMDSSWYEVRRQLKYKSEWRRKPYHETHMGFKSTQTCFHCKHVNDFVTLNMKTFTCRGCGRKIERESNAAANVREM
GFSELGL (SEQ ID NO: 320)
>3300017963|Ga0180437_10001136_87|P
[aquatic-non marine saline and alkaline-hypersaline lake sediment]
MRRSHALKLDPNAGQARKLRLYCIAHCKIWNHFLEKCKKGLIPKKSNAMTHQLGNKRMDETCPELLWVRDELGMNKQIQQVPCEDL
EKAWKRFFDWCRARKKGNVGLRRVGPPKFKSSRWMVGMSFGAKQGVEHDPETRKVRIPSIGWIRHFEKDVDFSNDKIKCCRVVWRA
SGWYCSLSMDNDIEIKSPLKWKKRKTHSVHLGIRHYAVLSDGNNVDHPRNLERNLDRLSKLCREWSRKKKGSRRWRIWRDRVRRVH
EKIANCRKDFIHKMTDDLLKKYPCLISEKWSISDMVENEKTKRKRRKIKAGRRKPGSRMMEKLLHRGIMDSSWYEVRRQLKYKSEW
RRKPYHETHMGFKSTQTCFHCKHVNDFVTLNMKTFTCRGCGRKIERESNAAANVREMGFSELGL (SEQ ID NO: 321)
>3300017971|Ga0180438_10021976_13|P
[aquatic-non marine saline and alkaline-hypersaline lake sediment]
MRRSHALKLDPNAGQARKLRLYCIAHCKIWNHFLEKCKKGLIPKKSNAMTHQLGNKRMDETCPELLWVRDELGMNKQIQQVPCEDL
EKAWKRFFDWCRARKKGNVGLRRVGPPKFKSSRWMVGMSFGAKQGVEHDPETRKVRIPSIGWIRHFEKDVDFSNDKIKCCRVVWRA
SGWYCSLSMDNDIEIKSPLKWKKRKTHSVHLGIRHYAVLSDGNNVDHPRNLERNLDRLSKLCREWSRKKKGSRRWRIWRDRVRRVH
EKIANCRKDFIHKMTDDLLKKYPCLISEKWSISDMVENEKTKRKRRKIKAGRRKPGSRMMEKLLHRGIMDSSWYEVRRQLKYKSEW
RRKPYHETHMGFKSTQTCFHCKHVNDFVTLNMKTFTCRGCGRKIERESNAAANVREMGFSELGL (SEQ ID NO: 322)
>3300017971|Ga0180438_10021976_11|M
[aquatic-non marine saline and alkaline-hypersaline lake sediment]
MTHQLGNKRMDETCPELLWVRDELGMNKQIQQVPCEDLEKAWKRFFDWCRARKKGNVGLRRVGPPKFKSSRWMVGMSFGAKQGVEH
DPETRKVRIPSIGWIRHFEKDVDFSNDKIKCCRVVWRASGWYCSLSMDNDIEIKSPLKWKKRKTHSVHLGIRHYAVLSDGNNVDHP
RNLERNLDRLSKLCREWSRKKKGSRRWRIWRDRVRRVHEKIANCRKDFIHKMTDDLLKKYPCLISEKWSISDMVENEKTKRKRRKI
KAGRRKPGSRMMEKLLHRGIMDSSWYEVRRQLKYKSEWRRKPYHETHMGFKSTQTCFHCKHVNDFVTLNMKTFTCRGCGRKIERES
NAAANVREMGFSELGL (SEQ ID NO: 323)
>3300025586|Ga0207996_1000986_11|P
[aquatic-non marine saline and alkaline-saline lake]
MTNRLRYSYRLYPTPEQRHALAQTFGCARVVWNDALARAQVGGAKYPGFAATSRLLTESKKSPARAWLNDVSCVPVQQSIRNLDIA
FRHFFNGLKGKGPKTGFPAWKRKDGKQSAEFTRRGFKLQRGKLCLAKIGDVEVRWSRSLPSAPKTATVTLDTAGRYHVSFTVEKVD
VAMEGGSPVGIDLGIKTFAALSTGELVHAPELKRLERRIDKAQRALSRCQKGSARRGRAKLRVAKLNATLADTRRDFLEKFSTRLV
RQHSLIALEDLAVANMTKNHCLARAVSRQGWRMFRTMVESKCERYGREIRIVNRWEPTSQVCSGCGHRWGKLGLGVREIACEGCGE
VHDRDINAAKNVVAAGLAETKNGRGEWVNRVVSMGTGVPFVEASTAGASPGVSAL (SEQ ID NO: 324)
>3300025642|Ga0208648_1003027_2|M
[aquatic-non marine saline and alkaline-saline lake]
MTNRLRYSYRLYPTPEQRHALAQTFGCARVVWNDALARAQVGGAKYPGFAATSRLLTESKKSPARAWLNDVSCVPVQQSIRNLDIA
FRHFFNGLKGKGPKTGFPAWKRKDGKQSAEFTRRGFKLQRGKLCLAKIGDVEVRWSRSLPSAPKTATVTLDTAGRYHVSFTVEKVD
VAMEGGSPVGIDLGIKTFAALSTGELVHAPELKRLERRIDKAQRALSRCQKGSARRGRAKLRVAKLNATLADTRRDFLEKFSTRLV
RQHSLIALEDLAVANMTKNHCLARAVSRQGWRMFRTMVESKCERYGREIRIVNRWEPTSQVCSGCGHRWGKLGLGVREIACEGCGE
VHDRDINAAKNVVAAGLAETKNGRGEWVNRVVSMGTGVPFVEASTAGASPGVSAL (SEQ ID NO: 325)
>3300028299|Ga0268276_1017374_5|P
[aquatic-non marine saline and alkaline-saline water]
MPMRWRWQTYTPRVRGVRVMKMHRAHRIRLNPTPEQEQYLWRCAGVARFTWNWALAAYNDTLARGEKPSIAKLKVEFNRLRAEESF
APWVGEVQSYAYQYAFGDLRTAINRYHKLRKADKLKPRAGWKPRKDGRPFGWPRFKARALTTPAFGLANNGGVHCAGNLAYLQRCP
SPINMAEELRFTGRILSGRVSYTGGHWYLSVSLDLPDPQPEPLSGRVGVDLGIKSLAVTSDGVVYENPKHLRANQRKLARLQRELS
RRTKGGKNRAKTQAKIARLHEQIANRRRETLHEMTTDLVSSYGTVVVEDLNVSGMLSNHRLALAVSDAAFGEIRRQLEYKAPAHGS
QVLVANQWFPSSKTCNDCGYITTLTLSDRVWTCPNCGVVHDRDINAAQNLRDYQPASAA (SEQ ID NO: 326)
>3300028299|Ga0268276_1017374_4|M
[aquatic-non marine saline and alkaline-saline water]
MKMHRAHRIRLNPTPEQEQYLWRCAGVARFTWNWALAAYNDTLARGEKPSIAKLKVEFNRLRAEESFAPWVGEVQSYAYQYAFGDL
RTAINRYHKLRKADKLKPRAGWKPRKDGRPFGWPRFKARALTTPAFGLANNGGVHCAGNLAYLQRCPSPINMAEELRFTGRILSGR
VSYTGGHWYLSVSLDLPDPQPEPLSGRVGVDLGIKSLAVTSDGVVYENPKHLRANQRKLARLQRELSRRTKGGKNRAKTQAKIARL
HEQIANRRRETLHEMTTDLVSSYGTVVVEDLNVSGMLSNHRLALAVSDAAFGEIRRQLEYKAPAHGSQVLVANQWFPSSKTCNDCG
YITTLTLSDRVWTCPNCGVVHDRDINAAQNLRDYQPASAA (SEQ ID NO: 327)
>SRR1221442_902393_36|P
[gut metagenome]
MKQAIRQMDGAYQKFFKQHNGFPKFKSKKDKQSALFPYEAISKHNTFETRHISLTTLLKNIRFRCSDLYFSRLQKYNKNIRSATLS
KTKSGNFFLSILIEMEDAELKRFGHTNKQVGIDLGVKDFVITSDGEVFENKHFFRKEERQVKKLHRQLSKKVKGSNNRKKTQVRIA
KLFERITNKKNAYIHYVTNELLTYFDTIFMEELNVKGMLRNHHLAKAIQEVGFYKFKETLVNKAFVNDKQVVFIDRFYPSSKTCSV
CGYKKQDLRLSDREWVCPKCGTKHNRDINAAVNILLEGQRMLTAG (SEQ ID NO: 328)
>3300001598|EMG_10002624_36|P
[mammals-digestive system-asian elephant f ecal-elephas maximus]
MKQAIRQMDGAYQKFFKQHNGFPKFKSKKDKQSALFPYEAISKHNTFETRHISLTTLLKNIRFRCSDLYFSRLQKYNKNIRSATLS
KTKSGNFFLSILIEMEDAELKRFGHTNKQVGIDLGVKDFVITSDGEVFENKHFFRKEERQVKKLHRQLSKKVKGSNNRKKTQVRIA
KLFERITNKKNAYIHYVTNELLTYFDTIFMEELNVKGMLRNHHLAKAIQEVGFYKFKETLVNKAFVNDKQVVFIDRFYPSSKTCSV
CGYKKQDLRLSDREWVCPKCGTKHNRDINAAVNILLEGQRMLTAG (SEQ ID NO: 329)
>ORBV01001191_65|M
[microbial mat metagenome]
MNDVSSVPVQQSIRNLDVAFRRFFNGLKGKGPKVGFPTWKRKDGKQSAEFTRSGFKLQRGKLYIAKVGDVDVRWSRALPSVPKTAT
VTLDAAGRYHVSFTVEKTDVALNGGSPVGVDLGIKTFAALSTGELVHAPDTKRLERRIGKAQRGLSRCRKGSARRGRAKLRVAKLH
AVLADTRRDFLEKFSTRLVREHSLIALEDLNVAGMAKNHCLARAVNRQGWRMFRTMVQSKCERYGREVRIVGRWEPTSQVCSGCGH
RWGRVGLGVRTIACEGCGEVHDRDVNAAKNVVAAGLADTENGRGEWVSRVVSMGTGVPFVEASTAGASPGISAL (SEQ ID NO:
330)
>ORBV01001191_63|P
[microbial mat metagenome]
MASLRYSYRLYPTTEQRRALAQTFGCVRVAWNDALARSQVSGAKYPGFAATSRLLTESKKSPERAWLNDVSSVPVQQSIRNLDVAF
RRFFNGLKGKGPKVGFPTWKRKDGKQSAEFTRSGFKLQRGKLYIAKVGDVDVRWSRALPSVPKTATVTLDAAGRYHVSFTVEKTDV
ALNGGSPVGVDLGIKTFAALSTGELVHAPDTKRLERRIGKAQRGLSRCRKGSARRGRAKLRVAKLHAVLADTRRDFLEKFSTRLVR
EHSLIALEDLNVAGMAKNHCLARAVNRQGWRMFRTMVQSKCERYGREVRIVGRWEPTSQVCSGCGHRWGRVGLGVRTIACEGCGEV
HDRDVNAAKNVVAAGLADTENGRGEWVSRVVSMGTGVPFVEASTAGASPGISAL (SEQ ID NO: 331)
>OVSM01005865_8|M
[seawater metagenome]
MRWWMVRLKESQEYSFLRELNSQSLVSRLRELDNTYWDCFLKRKEGAQLPVIKKRSKHNSFHLPDPKKQAQVKGNKVKLSKIGEVT
FFKSRKIDGEIRTARVFYRTGYWYISFQVKQEIDIPKRKDKGRAGIYLGGKNLLTLVTNKNKKERYDLLNIYGKYEPLLKKKQKSL
KRKVSFSKNWEKKQAEIKKIHRKIFNTRRDTLHKISTEVCKNHATIYLSDFRVLKTLNKGRLKKKEKEKNKKVLDQGLWYLKEFIV
YKGLWRGNIVKKVNNENSILTCSSCGVINDTRQGEKFCCNDCGLKESLEINAAKNILAAGHAVTVCEANQLRN (SEQ ID NO:
332)
>OVXX01005191_2|P
[seawater metagenome]
MRWWMVRLKESQEYSFLRELNSQSLVSRLRELDNTYWDCFLKRKEGAQLPVIKKRSKHNSFHLPDPKKQAQVKGNKVKLSKIGEVT
FFKSRKIDGEIRTARVFYRTGYWYISFQVKQEIDIPKRKDKGRAGIYLGGKNLLTLVTNKNKKERYDLLNIYGKYEPLLKKKQKSL
KRKVSFSKNWEKKQAEIKKIHRKIFNTRRDTLHKISTEVCKNHATIYLSDFRVLKTLNKGRLKKKEKEKNKKVLDQGLWYLKEFIV
YKGLWRGNIVKKVNNENSILTCSSCGVINDTRQGEKFCCNDCGLKESLEINAAKNILAAGHAVTVCEANQLRN (SEQ ID NO:
333)
>3300005549|Ga0070704_100000680_37|P
[terrestrial-soil-corn, switchgrass and miscanthus rhizosphere]
MPGDAPAGHVYLRAFQTELDPTVAERRLLGRHVAAARVSHNWALERWNSLQCPRAIVRGLRALAGLDVKGGEAANMLGVFLRALVF
GTPVAVRTPKGAARRYRYKPPEPPDVDVSPNGPSIHASLVREKNNAQDLAWLGEVSAFAVREAVEDVADGWKHFFEHLKAGRFDKA
GPPQFRKARDRHYHVDQPDPIRVTDRAVKIPGVGWVRLKERGYLPPTRADSHALVGGGKCVGLGISERDGRWYVSLRAHVPRPMPQ
KRAPGRAKRDAPVPRNPNLTLGVEVGVRSLVTLSTGAHFAGLREDERIIAATRRLHLWQRRQERRWQRGKSRREQSAGWREAVRWV
GHYHAQLTDLRADLTGKAVRAIVDTGAAVIVMREPATAKMLARRHASEPRTRNALAPAVHAARMGDVLRRVGYKQKWAGGQLVEVP
VAEPVTRRCNKCGAVRDTEPAYPDFHCTACGHREERDDNAAANLKDYPGRNPGADPGRSGPDSPSAHTEGVTAGGTAGTASGESPG
HGSGRKARERASLGPGNRPRAGARLTAQADQPLTSPRYDGALREHRGDAPEQSQGNHTPAAPVPADDGDRSQTVSQPRERTAELRG
VSGAQP (SEQ ID NO: 334)
>3300005549|Ga0070704_100000680_28|M
[terrestrial-soil-corn, switchgrass and miscanthus rhizosphere]
MKLKDGGNIMPGDAPAGHVYLRAFQTELDPTVAERRLLGRHVAAARVSHNWALERWNSLQCPRAIVRGLRALAGLDVKGGEAANML
GVFLRALVFGTPVAVRTPKGAARRYRYKPPEPPDVDVSPNGPSIHASLVREKNNAQDLAWLGEVSAFAVREAVEDVADGWKHFFEH
LKAGRFDKAGPPQFRKARDRHYHVDQPDPIRVTDRAVKIPGVGWVRLKERGYLPPTRADSHALVGGGKCVGLGISERDGRWYVSLR
AHVPRPMPQKRAPGRAKRDAPVPRNPNLTLGVEVGVRSLVTLSTGAHFAGLREDERIIAATRRLHLWQRRQERRWQRGKSRREQSA
GWREAVRWVGHYHAQLTDLRADLTGKAVRAIVDTGAAVIVMREPATAKMLARRHASEPRTRNALAPAVHAARMGDVLRRVGYKQKW
AGGQLVEVPVAEPVTRRCNKCGAVRDTEPAYPDFHCTACGHREERDDNAAANLKDYPGRNPGADPGRSGPDSPSAHTEGVTAGGTA
GTASGESPGHGSGRKARERASLGPGNRPRAGARLTAQADQPLTSPRYDGALREHRGDAPEQSQGNHTPAAPVPADDGDRSQTVSQP
RERTAELRGVSGAQP (SEQ ID NO: 335)
>3300010400|Ga0134122_10000002_228|P
[terrestrial-soil-terrestrial soil]
MTTILRAYKTELDPTDEQRVVLARHVAGARVAHNWALEKWKELDGTRGVALGCRALAGIDAKGGEAAALFGYCLAALIRGEPVKVR
TPKSEAGSRYRYRPASGVQLPDFRAGRVDWYSQLVSAKEEQPERFGWLSELSAFAIREAVLDVADGWKHFFEHLKAGRYASAGPPR
FRGRQRASYHSDQPDPIRVTERAVKIPGVGWVRMKERGYLPVTEENSHRFIGGGKACGLGVSEKDGRWYVALRCEVPRPFPQKRGP
GRALAMHQTKRVPGRELGVEVGVRVLAVASTGERAGHVWHSPLRDDRRIDKFEMLRKRWERRMARRWKDGVKTRDQSQGWKEAAMR
VAHYHARIKSLRDDVCGKAARQIADMGAETVRMRGPGIAKMLSRAGKRGDAARTRNRLAKNVHAARMGDLRRRLEYKQAWAGGRLE
LVPIEEPTTNRCSACNAVRDTNAGYPTFMCPTCGYQEDRDDNSAINLLNYRAPSGDPAAGPRSAGLKPPKGDNGRRKRTARAEEKS
SVTAPHGDVTSAPGPGNRVSGASHSVRPIDAYHEVPFEQSGDAHLGSRQFGLDTALFGADDPNRSQIEPQRSEFPGLLAHRAGGTS
(SEQ ID NO: 336)
>3300009089|Ga0099828_10012481_2|M
[terrestrial-soil-vadose zone soil]
MKQLCAMQEALRDLETAYRNFFRRVALGKQGLWRGKLGFPKMKKKSKAIGSFRLTGSIKVFSGTVQLPRLGCLRLHEHDFIPTDAK
VLSATVSEQAGRWFVSIQVEEEQEKPPPTATTAIGVDLGIKTLATCSDGKIFANPRALSHAHKMLRRLERQKSRRKKGGKNRKKIC
RKLAKQHARVANIRKDAAHKLSSYLCKNHALVAIEDLHVAGMLKNHKLAQAVSDSNFGEIRRQLEYKAFWQGVHLVIIDRWYASSK
TCSGCGWVDENQDLSDRTFICQECGLVMDRDENAAINILNEALRTTGSYSGSHAYGESSSGLVSGSGETALVEIGTNLHVGMS
(SEQ ID NO: 337)
>3300012201|Ga0137365_10010044_6|P
[terrestrial-soil-vadose zone soil]
MKRAAPLESGMIRRAYRVRLEPTAEQRRELARCVGVARAAFNWALAEWRRQYRAYKLAEKAPARALRLLARWQSPLAEDPRWQGGD
NPKPNGFAIHKRLTAIKREQFPWMTDVPALVVREAVGDVGAAYEHFFRRLKEGAVGREAGEPRFRSRHRRKSFHMDQGDAIKIARF
VRADETTGRHADAIVLPVLGSVHVHKRQNGFLPAGAKLCGVGISEHLGLWYAAVRAEVPAPAPRRKRMAEKRLGVEVGVRSLAVTS
DGKRIGALRDLDKTKSGERRLALWLRRMSRRFRQGAKKQSAGWVEAKHHVQRLHSEIAETRDELLHYASRRVVDSGAAVVVMREPN
VRGMIGKAGKTGEAARARNVIAPMVSKVGWYELRRKVEYKQQWAGGAFVEAPAEIESTKTCSVCGSVRDTDPGYPLFRCPSCGHQE
DREANSSKVLRDYRPPSGGPVGGDRADRRKTARKRGTMAERTGKPGGEQSAPTGPDGVATSPHGSGNGAASQEAETGAVIRDPTRP
PGEPGARLRVPSATASDGGHEPIDSQESCVFASPPDGPDGDRSQTASQASETSGGSA (SEQ ID NO: 338)
>3300012356|Ga013737l_10006599_2|M
[terrestrial-soil-vadose zone soil]
MKRAAPLESGMIRRAYRVRLEPTAEQRRELARCVGVARAAFNWALAEWRRQYRAYKLAEKAPARALRLLARWQSPLAEDPRWQGGD
NPKPNGFAIHKRLTAIKREQFPWMTDVPALVVREAVGDVGAAYEHFFRRLKEGAVGREAGEPRFRSRHRRKSFHMDQGDAIKIARF
VRADETTGRHADAIVLPVLGSVHVHKRQNGFLPAGAKLCGVGISEHLGLWYAAVRAEVPAPAPRRKRMAEKRLGVEVGVRSLAVTS
DGKRIGALRDLDKTKSGERRLALWLRRMSRRFRQGAKKQSAGWVEAKHHVQRLHSEIAETRDELLHYASRRVVDSGAAVVVMREPN
VRGMIGKAGKTGEAARARNVIAPMVSKVGWYELRRKVEYKQQWAGGAFVEAPAEIESTKTCSVCGSVRDTDPGYPLFRCPSCGHQE
DREANSSKVLRDYRPPSGGPVGGDRADRRKTARKRGTMAERTGKPGGEQSAPAGPDGVATSPHGSGNGAASQEAETGAVIRDPTRP
PGEPGARLRVPSATASDGGHEPIDSQESCVFASPPDGPDGDRSQTASQASETSGGSA (SEQ ID NO: 339)
>3300006417_501592_1|M
[wastewater metagenome]
MLKAHVIRLNPTEEQASYFWRCAGIARFTWNWALAELNAAYDRGERPAIGSLKLAFNRLRKEEGFAPFVGEVQSYAYQQAFTDLQK
ALSRYHDFRKRGLLKPPAGWKGRKDHKPFGWPRFKARNRSTPAFYLANNGGLRLQGHQVTIQRCPGGPVNMAEQLRFAGRVMGGRV
RYRAGHWYLTVQVDVPVEPVPAHTGPAVGLDVGIKALAVTSDGEIYDNPKALGRHQRKLRLLQRSLARQTRGGSNYRKTQAKIARL
HERIANIRKHTLHQISHEITRDYGLIGLEDLNVAGMLENGKLARSISDVAFGELRRQIGYKSEWRGSRVVIVSRWFPSSKTCNECG
HVMADMPLSVRWWQCPTCGAEHDRDGNAAVNIRNEAVKMAGAA (SEQ ID NO: 340)
>SRR6837571_682758_2|M
[wastewater metagenome]
MLKAHVIRLNPTEEQASYFWRCAGIARFTWNWALAELNAAYDRGERPAIGSLKLAFNRLRKEEGFAPFVGEVQSYAYQQAFTDLQK
ALSRYHDFRKRGLLKPPAGWKGRKDHKPFGWPRFKARNRSTPAFYLANNGGLRLQGHQVTIQRCPGGPVNMAEQLRFAGRVMGGRV
RYRAGHWYLTVQVDVPVEPVPAHTGPAVGLDVGIKTLAVTSDGEIYDNPKALGRHQRKLRLLQRSLARQTRGGSNYRKTQAKIARL
HERIANIRKHTLHQISHEITRDYGLIGLEDLNVAGMLKNGKLARSISDVAFGELRRQIGYKSEWRGSRVVIVSRWFPSSKTCNECG
HVMADMPLSVRWWQCPTCGAEHDRDGNAAVNIRNEAVKMAGAA (SEQ ID NO: 341)

TABLE 182
Nucleotide Sequences of Representative CLUST.342201 Direct Repeats and Spacer
Lengths

| | | Spacer |
|---|---|---|
| CLUST.342201 Effector Protein | | Length |
| Accession | Direct Repeat Nucleotide Sequence | (s) |
| 3300006417\|Ga0069787_ | GTTCACCCCACGGGTGCGTGGAGTGATGG (SEQ ID NO: 342) | 32-33 |
| 10357475_9\|M (SEQ ID NO: 301) | CCATCACTCCACGCACCCGTGGGGTGAAC (SEQ ID NO: 451) | |
| 3300022602\|Ga0248169_134333_ | GTTCGCCGCGCATACGCGGCTTAAAAG (SEQ ID NO: 343) | 33 |
| 3\|P (SEQ ID NO: 302) | CTTTTAAGCCGCGTATGCGCGGCGAAC (SEQ ID NO: 452) | |
| 3300022602\|Ga0248169_134333_ | GTTCGCCGCGCATACGCGGCTTAAAAG (SEQ ID NO: 343) | 33 |
| 4\|M (SEQ ID NO: 303) | CTTTTAAGCCGCGTATGCGCGGCGAAC (SEQ ID NO: 452) | |
| 3300025018\|Ga0210043_1027795_ | GGTTACCCCGCGCGGGTGTGGAGTGAGGG (SEQ ID NO: 344) | 32-33 |
| 3\|M (SEQID NO: 304) | CCCTCACTCCACACCCGCGCGGGGTAACC (SEQ ID NO: 384) | |
| 3300020198\|Ga0194120_10001032_ | CTTGCGGGATCGGTTTGAATGGATAGGAAAGTGACAT (SEQ ID NO: | 33-36 |
| 39\|P (SEQ ID NO: 305) | 345) | |
| | ATGTCACTTTCCTATCCATTCAAACCGATCCCGCAAG (SEQ ID NO: | |
| | 385) | |
| 3300014060\|Ga0119967_10019787_ | GGTTACCCCGCGCGGGTGTGGAGTGAGGG (SEQ ID NO: 344) | 32 |
| 9\|M (SEQ ID NO: 306) | CCCTCACTCCACACCCGCGCGGGGTAACC (SEQ ID NO: 384) | |
| 3300020180\|Ga0163155_10006838_ | CAGCGCACGAGGAGGTGCTG (SEQ ID NO: 346) | 22 |
| 6\|M (SEQ ID NO: 307) | CAGCACCTCCTCGTGCGCTG (SEQ ID NO: 386) | |
| 3300020180\|Ga0163155_10006838_ | CAGCGCACGAGGAGGTGCTG (SEQ ID NO: 346) | 22 |
| 8\|P (SEQ ID NO: 308) | CAGCACCTCCTCGTGCGCTG (SEQ ID NO: 386) | |
| 3300020219\|Ga0163146_10008638_ | CTGCCATGGTGGCGTGGTCGGGAAGTCCCCATGGCATGGGCTCTGTCTCAT | 20-21 |
| 12\|M (SEQ ID NO: 309) | TCGGCGAACCGCCC (SEQ ID NO: 347) | |
| | GGGCGGTTCGCCGAATGAGACAGAGCCCATGCCATGGGGACTTCCCGACCA | |
| | CGCCACCATGGCAG (SEQ ID NO: 387) | |
| 3300020219\|Ga0163146_10008638_ | CTGCCATGGTGGCGTGGTCGGGAAGTCCCCATGGCATGGGCTCTGTCTCAT | 20-21 |
| 11\|P (SEQID NO: 310) | TCGGCGAACCGCCC (SEQ ID NO: 347) | |
| | GGGCGGTTCGCCGAATGAGACAGAGCCCATGCCATGGGGACTTCCCGACCA | |
| | CGCCACCATGGCAG (SEQ ID NO: 387) | |
| 3300001380\|JGI1356J14229_ | GGCACAGTGGTTGGCTTCTTCTTCCCA (SEQ ID NO: 348) | 21 |
| 10025169_2\|P (SEQ ID NO: 311) | TGGGAAGAAGAAGCCAACCACTGTGCC (SEQ ID NO: 388) | |
| 3300014613\|Ga0180008_1001166_ | GTACACCCCACGGGTGCGTGGAGTGAGGG (SEQ ID NO: 349) | 32-33 |
| 14\|P (SEQ ID NO: 312) | CCCTCACTCCACGCACCCGTGGGGTGTAC (SEQ ID NO: 389) | |
| 3300014613\|Ga0180008_1001166_ | GTACACCCCACGGGTGCGTGGAGTGAGGG (SEQ ID NO: 349) | 32-33 |
| 12\|M (SEQ ID NO: 313) | CCCTCACTCCACGCACCCGTGGGGTGTAC (SEQ ID NO: 389) | |
| 3300014656\|Ga0180007_10002258_ | GTACACCCCACGGGTGCGTGGAGTGAGGG (SEQ ID NO: 349) | 32-33 |
| 14\|P (SEQ ID NO: 314) | CCCTCACTCCACGCACCCGTGGGGTGTAC (SEQ ID NO: 389) | |
| 3300014656\|Ga0180007_10002258_ | GTACACCCCACGGGTGCGTGGAGTGAGGG (SEQ ID NO: 349) | 32-33 |
| 12\|M (SEQ ID NO: 315) | CCCTCACTCCACGCACCCGTGGGGTGTAC (SEQ ID NO: 389) | |
| 3300013127\|Ga0172365_10076875_ | GTCGGGCCCACGCGTACGTGGGCGATTGG (SEQ ID NO: 350) | 32-39 |
| 1\|P (SEQ ID NO: 316) | CCAATCGCCCACGTACGCGTGGGCCCGAC (SEQ ID NO: 390) | |
| 3300007960\|Ga0099850_1017825_ | ATACGCCCCACGTGCGTGTGGGGTGAGGG (SEQ ID NO: 351) | 32-33 |
| 5\|M (SEQ ID NO: 317) | CCCTCACCCCACACGCACGTGGGGCGTAT (SEQ ID NO: 391) | |
| 3300025687\|Ga0208019_1031224_ | ATACGCCCCACGTGCGTGTGGGGTGAGGG (SEQ ID NO: 351) | 32-33 |
| 1\|P (SEQ ID NO: 318) | CCCTCACCCCACACGCACGTGGGGCGTAT (SEQ ID NO: 391) | |
| 3300025687\|Ga0208019_1031224_ | ATACGCCCCACGTGCGTGTGGGGTGAGGG (SEQ ID NO: 351) | 32-33 |
| 1\|M (SEQ ID NO: 319) | CCCTCACCCCACACGCACGTGGGGCGTAT (SEQ ID NO: 391) | |
| 3300017963\|Ga0180437_10001136_ | CGTGTGAATGCGTGAAATTGAGTAGAGGATATGTCAG (SEQ ID NO: | 28-37 |
| 84\|M (SEQ ID NO: 320) | 352) | |
| | CTGACATATCCTCTACTCAATTTCACGCATTCACACG (SEQ ID NO: | |
| | 392) | |
| 3300017963\|Ga0180437_10001136_ | CGTGTGAATGCGTGAAATTGAGTAGAGGATATGTCAG (SEQ ID NO: | 28-37 |
| 87\|P (SEQ ID NO: 321) | 352) | |
| | CTGACATATCCTCTACTCAATTTCACGCATTCACACG (SEQ ID NO: | |
| | 392) | |
| 3300017971\|Ga0180438_10021976_ | GTGTGAATGCGTGAAATTGAGTAGAGGATATGTCAG (SEQ ID NO: | 35-36 |
| 13\|P (SEQ ID NO: 322) | 353) | |
| | CTGACATATCCTCTACTCAATTTCACGCATTCACAC (SEQ ID NO: | |
| | 393) | |
| 3300017971\|Ga0180438_10021976_ | GTGTGAATGCGTGAAATTGAGTAGAGGATATGTCAG (SEQ ID NO: | 35-36 |
| 11\|M (SEQ ID NO: 323) | 353) | |
| | CTGACATATCCTCTACTCAATTTCACGCATTCACAC (SEQ ID NO: | |
| | 393) | |
| 3300025586\|Ga0207996_1000986_ | CGCAAGCCGAAGGCTTACGGATGCGG (SEQ ID NO: 354) | 15-50 |
| 11\|P (SEQ ID NO: 324) | CCGCATCCGTAAGCCTTCGGCTTGCG (SEQ ID NO: 394) | |
| 3300025642\|Ga0208648_1003027_ | CTGCGCAAGCCGAAGGCTTACGGATGCGG (SEQ ID NO: 355) | 12-18 |
| 2\|M (SEQ ID NO: 325) | CCGCATCCGTAAGCCTTCGGCTTGCGCAG (SEQ ID NO: 395) | |
| 3300028299\|Ga0268276_1017374_ | GTACACCCCACGGGTGCGTGGAGTGAGGG (SEQ ID NO: 349) | 32 |
| 5\|P (SEQ ID NO: 326) | CCCTCACTCCACGCACCCGTGGGGTGTAC (SEQ ID NO: 389) | |
| 3300028299\|Ga0268276_1017374_ | GTACACCCCACGGGTGCGTGGAGTGAGGG (SEQ ID NO: 349) | 32 |
| 4\|M (SEQ ID NO: 327) | CCCTCACTCCACGCACCCGTGGGGTGTAC (SEQ ID NO: 389) | |
| SRR1221442_902393_361P | TCTTCATCAACCTTCACATCTAC (SEQ ID NO: 356) | 17-20 |
| (SEQ ID NO: 328) | GTAGATGTGAAGGTTGATGAAGA (SEQ ID NO: 396) | |
| 33000015981 EMG_10002624_ | TCTTCATCAACCTTCACATCTAC (SEQ ID NO: 356) | 17-20 |
| 36\|P (SEQ ID NO: 329) | GTAGATGTGAAGGTTGATGAAGA (SEQ ID NO: 396) | |
| ORBV01001191_65\|M | CTGCCATGGTGGCGTGGTCGGGAAGTCCCCATGGCATGGGCTCTGTCTCAT | 20-21 |
| (SEQ ID NO: 330) | TCGGCGAACCGCCC (SEQ ID NO: 347) | |
| | GGGCGGTTCGCCGAATGAGACAGAGCCCATGCCATGGGGACTTCCCGACCA | |
| | CGCCACCATGGCAG (SEQ ID NO: 387) | |
| ORBV01001191_63\|P | CTGCCATGGTGGCGTGGTCGGGAAGTCCCCATGGCATGGGCTCTGTCTCAT | 20-21 |
| (SEQ ID NO: 331) | TCGGCGAACCGCCC (SEQ ID NO: 347) | |
| | GGGCGGTTCGCCGAATGAGACAGAGCCCATGCCATGGGGACTTCCCGACCA | |
| | CGCCACCATGGCAG (SEQ ID NO: 387) | |
| OVSM01005865_8\|M | AATATTACACATAAAACTACATACATAATTACATA (SEQ ID NO: | 25 |
| (SEQ ID NO: 332) | 357) | |
| | TATGTAATTATGTATGTAGTTTTATGTGTAATATT (SEQ ID NO: | |
| | 397) | |
| OVXX01005191_2\|P | AATATTACACATAAAACTACATACATAATTACATA (SEQ ID NO: | 25 |
| (SEQ ID NO: 333) | 357) | |
| | TATGTAATTATGTATGTAGTTTTATGTGTAATATT (SEQ ID NO: | |
| | 397) | |
| 3300005549\|Ga0070704_ | CCGTGACGGGGCGTCGTGGTCAG (SEQ ID NO: 358) | 49-50 |
| 100000680_37\|P (SEQ ID NO: 334) | CTGACCACGACGCCCCGTCACGG (SEQ ID NO: 398) | |
| 3300005549\|Ga0070704_ | CCGTGACGGGGCGTCGTGGTCAG (SEQ ID NO: 358) | 49-50 |
| 100000680_28\|M (SEQ ID NO: 335) | CTGACCACGACGCCCCGTCACGG (SEQ ID NO: 398) | |
| 3300010400\|Ga0134122_ | TCGTGACGGGCGGCGCTTGTCAG (SEQ ID NO: 359) | 36-55 |
| 10000002_228\|P (SEQ ID NO: 336) | CTGACAAGCGCCGCCCGTCACGA (SEQ ID NO: 399) | |
| 3300009089\|Ga0099828_ | TTGATCAGATCATCGAGTTGAGTGAGCACGAGGT (SEQ ID NO: 360) | 52-62 |
| 10012481_2\|M (SEQ ID NO: 337) | ACCTCGTGCTCACTCAACTCGATGATCTGATCAA (SEQ ID NO: 454) | |
| 3300012201\|Ga0137365_ | CTTGCAATGCGCGAAGGAAAGCGTCGACGTGGTCAC (SEQ ID NO: | 29-40 |
| 10010044_6\|P (SEQ ID NO: 338) | 361) | |
| | GTGACCACGTCGACGCTTTCCTTCGCGCATTGCAAG (SEQ ID NO: | |
| | 401) | |
| 3300012356\|Ga0137371_ | CTTGCAATGCGCGAAGGAAAGCGTCGACGTGGTCAC (SEQ ID NO: | 29-40 |
| 10006599_2\|M (SEQ ID NO: 339) | 361) | |
| | GTGACCACGTCGACGCTTTCCTTCGCGCATTGCAAG (SEQ ID NO: | |
| | 401) | |
| 3300006417_501592_1\|M (SEQ ID | GTTCACCCCACAGGCGCGTGGAGTGATGG (SEQ ID NO: 362) | 32 |
| NO: 340) | CCATCACTCCACGCGCCTGTGGGGTGAAC (SEQ ID NO: 402) | |
| SRR6837571_682758_2\|M (SEQ ID | GTTCACCCCACAGGCGCGTGGAGTGATGG (SEQ ID NO: 362) | 32 |
| NO: 341) | CCATCACTCCACGCGCCTGTGGGGTGAAC (SEQ ID NO: 402) | |

TABLE 193
Non-coding Sequences of Representative CLUST.342201 Systems

>3300013127|Ga0172365_10076875_1|P
GTTAGCACACAAGCGATAGCACATGACCGCGCCGAGGAGAGCGCAAGCTCTGCCAAACCCTCGGCGCGGTTTTTGTGCGCCTATGC
AGCCCGCCCTAATAACGTATATTATCGGACGTTATCCAGGGGCGGTTCGGGTCAGAAGCGGTCAGAAAAATGACGGCAATTTCGAT
TTCGCACAAGATTGCGCTTGAGCCTACGAAATTGCAGGCTGCCCACTTCGCGCTGTGCGTCGGTGCCTCGCGAAAGGCATACAATT
GGGCGCTGGATACGTGGAATCGCCAGTGGGACGATGGCAGAAAGCCGTGTTCGCGGTGCGGCCGCCGCAACTATGATGCGCGGAAG
TATGGCAAGCGATTTGTATGCCCGCATTGCGGGCTGGACATCGAGAACGGCGTGAACATTGCGTCGAATCTCGCTACCGTCAAATC
GGCGGAAAGTCAAGCCTGTGGATAGGCCGGCGTCAACCCCACGCTGCCCGTGAACGTGGCGCTACAATGGCCGAGAAGCAGGAACC
CGTGTACGCGTGGTCTTTGATATTTTGTGTGGGCTTGGACTGGGCACCACAAGATGTGGTCTTCAAGCGGCTCGTTCGGTGCGGGC
GGCATTTAACAATCTGACAACCCGCAGTCTGTAGCCGCCCGCGCCGGATGTTGAGGAGTAAACAATGGACACTCTAAGCGTGATCG
TAAATTGTGTAGCGCTTGCGGTCGTGGCCGGTGCTCTCGTTTACCTCGGATGGGCGCTCTACCAAGCGTATAGGAGGCGAATATGA
TGTTCTTAACTGATCTGCTTCACGATGCGGA (SEQ ID NO: 363)
>OVSM01005865_8|M
AAAACTACATACGATATTACATATAATTTATAACATAATATTACACACAAACTACATACATAATTACATACAATTTACAACATAGT
ATTACATACAAAACTACACATGATATTACATATTTTTATAAACCTATAAAACAAAATTCCTTCTTATAAACAAGATTACCCTAGTT
GATGATATTATACACAACACCACATTATGTCATAGAAATATATATCTTTCATTTTTCTGTAAAAAAACACTAGGTTTGTATAGTTT
TTTGCAAAAAAACGTTCCCCCCCTAAAATAATTTTTTTCTTCTAAAAGAATTTTTTTGCCTTTACAAGTTACCACTGTTAATGCAT
GATGAACTTAAACTTAAAAAATGGTGAAATATATTTTGTAAAAAACCTTCAAAAAGACAAAAAAAAAGAGCTAGACTCTTGCTTCA
AAGACAAAACCAAGAAACAAAAATCTAATCTCTCTAACATCAAGATTATGATACTATATTTCAACAGAACTATTTTAGTTATGGGT
AGTGATTTTAAGGTGTCTTATGTGAAAGCGACCTTTTGGAGAGAGCTTGAAGAGCTTAAGAAATCCTTTTTTTCTACAAGAGACTT
TTCTGTAGAAAAGAGAGAAGCACACCAACAAGGGAGTTAAGTGTGCTTCTAATAATGAAAATCTACTAACAGATTCGCGTTCCATT
TTACTCTAAAAAGATAATTTTAACAAATAGGAAAAAATATTTCTTTAATTGAGAAAATTTACATTTCTGGTTACAATGATCATTGC
AAAAGGGATGCGAAAATAGGTTTTTAAGTGATAATCCACAAAACATATCAGTTTAGATTAAAGCCAACAAAAGAACAGGAGGCTTT
GTTTTGGCGGTTTTCCGGTCATTGCAGGTTTATCTGGAATTACTTTTGGAAAATAAATAAAATCAGACTCGATAACAAACAAAAAA
TAATGAAGTTCTACGAAATGCGCTGGTGGATGGTTCGTCTGAAAGAGTCGCAGGAATATAGCTTTTTAAGAGAATTAAATTCTCAG
TCTTTAGTTTCTCGTTTGAGGGAGTTGGATAATACGTATTGGGATTGTTTTTTAAAGAGAAAAGAAGGAGTTCAACTTCCTTGTGG
CGTTATTAATGATACCAGACAAGGAGAAAAATTTTGTTGCAATGATTGCGGTTTAAAAGAGTCGCTAGAGATAAATGCAGCAAAAA
ATATATTGGCGGCAGGGCATGCCGTGACGGTCTGTGAAGCGAATCAATTAAGAAATTAAGAGATCGGCAGCAGAAACCTGTAGAGA
TATGTGAATATATCTACCTTAGAAATAGGAATCTCATACCGTAAAGGGAAGAGAGGATGCCAACCTGCGTATTTTAATCTATATTT
GGAGAACTTGCTCTAAATGAAAAAGGAAGTTAGCATAGGAAATGTAAATAGTATTAAGACAGGAAAAATATCAATGAATAAATCTT
TAAGAAATCTAATTGTCATTCTTTCTTTTTTTGCTTTATCTGGCTGCCAGAATAAAGATATAAACACTACAGGTAATTCT (SEQ
ID NO: 364)
>3300014613|Ga0180008_1001166_12|M
GCCGATGAAACGCTCAAGGCTTGTATTGCCTGGCCGCTGTTGACCCTGGCTGATCTGGAGACGTTGCTTTCGGTAATAAACGAGGC
GTGCGAAACCCGATTCACCATCATCTCCGAGATGCAGAAACGCAATCGGCGCGCCCGCATTTGATCGAAAGTGTAGGAAGTTGCGA
ATAACTATTGACATTTTAGCAGAGGTGTGCTAGAATACATTTGCTTGGAACTGACAAGCCAAGTAGTTATAAATGGACTCTCCGCT
AAGACTCCTGCTCCGAAAGTTGGGGCCGACTTGCCTTAGCGCCTGTCAAGCGCAAATGCGGAGAGTCGGCGGTCGGAACCAACTTT
TAGCGCAGGAGTTTCTTTGTCTACAAATATCGCCGAAATACTCATGCGGAGATGTAAAACGCCTGGGGATGGTCGAGGTTCAACTA
AACCAGATGAACCAGGAATCCATACACTCGTTAGGAGCGAGAGAAATGCATAGAGCACATCGAATCCGATTGAATCCAACGCCGGA
ACAGGAAAAATATCTCTGGCGTTGCGCTGGCGTAGCCCGCTTCACCTGGAATTGGGCGCTGGCAGCTTACAATGACACTCTGGTCC
GCGGCGAGAAGCCATCAATTGCCAAGCTCAAAGTCAAATTCAATCGCAGTAGCAAAACGTGCAACGACTGCGGTTGCGTCACTGCG
CTAACGTTGTCTGACCGCGTATGGACATGCCCGAATTGTGGCGTTGTCCATGATCGAGATATCAATGCTGCGCAAAACCTGCGTGA
TTATCAGCCCGTTAGCGTAGCTTGATGGAATACAATATGTCGCCGGAGTACTCACCTGGAGACGCTAAACGCCTAGGGATGGTAGT
GGTAGTAGTCACGCCAAACGAACTAGGAATCTACGTGCTCCGTAAGCGCGTGGAGTGAGGGAAACGGGTGCGTCTACACCGAACGG
TGAACGCTTCCCGCCAGACACAGAAAACACCTGGCGCTCCGGCTTGACAGCCTGAGCGTTCCGTCGGTTTGCCGAAAGGCAGTGAG
CTTCGCACGAGTGCCGCCAACGCGGCCACCCTGTAAATTCAACCACCTGGAAGGGTCTGAATGCGAGTGCCCATCCCGCCAAGGGG
TGGGTCTGCCCTGTTCTCGCCAACCTTATCGTGTAATTCCAATCCTCTTGCCAGCCTATGGCCTCTGCACATCCTCCAATTGCTGA
AGAATGTAACTGGTCGTGTTTCCCTGTAAATTGGTTTCCAAATCCACGATATTGTCTATTGACAAACGGTAAAACCGTGATATAAT
GGGTTTAGGATGAAACGAAAGCAACGGGCACATGAAGGGAATCGCAAATGGAACACAGCGAAACTAGAGAAGAGCTGATCCAAGGC
ATTACCATGAATACTCAGGCTTGGCTGGCAGTGTTCTGAACCGGCAGGGTTGCGCAACAAGACCCGCTATCGCAAGCCGACTGCAC
CTTACGCAGAATCACTACAACTCGCGCGGACTTTCAACCAACACAGGAGGATAACCGCCATGGAACCCAAAATCAGCCAGTGCGAA
TGCGCCAACTGTGGCCGGTGCTGGAAA (SEQ ID NO: 365)
>3300020198|Ga0194120_10001032_39|P
TATGTAATAACTGAGAGACAGCTTAGGATAATTGAGGATGAGCTATTTAATATAAAAGATTTGGTTTCTAGTTTAGAGGATAGTGA
TATAAAATTTAGTATAGAAAAAAGTGTAGATAGGCTGATAGAAAGTATGTTTGATGGAGGATGATCTGCGAGGGCTCTGGTGCTGT
TCCAAATCTTAGGAACCTCTCGCGGTAGGCGGTGACTGGATCTTAGCCAGATATGTTTAAAATTTGAGCTTAGCTGCTATAATTAA
GAACGTACCCCTCGCAAGGGGAGCCTCAGAGACAGTCAGTATCTAGGCTTTACAGAAAGCCCACCTTCCAGCAGCGGCCCCGGCGT
GGCGCAACGAGACTACATTCCATTTTGATTATTAAATAAACTATAATAAAATGATATGGAGGAATCAACAAAGGAATGAATAATAA
TTTTGTAGTAATAGATTTTGAAACAGGAGGTTTAGATGCTAGTCTACACGATCCAGTGCAGATAGCAGCTATTATTTTAGACGGGA
AAACACTAAAAGAACGTGGAAGGTTTGTTTCTATGATAAAAGCCAGTAGAGACGTTTATGATACAGAGAATAATATAATTTCCCAT
AATATAGTACCTACAAGTCTTTTAACTAATATAGTAACAATGTCTACTAAGAGAAACAGAGAAAAATACGAGGTACTTTTAAAGGA
AGAAAATATTTCTAGGGATAGGATTGACTAGAAATAGTTTTTAATTAAATGCCCTCCTTTAGTGGAGGGCATTTTTTCTTAGTGAA
AGTACTTAGCAGTTTACCAAAAAAATCTATAAAAACTTTTAAAATATATATAAATTTTCATCAACAATGTGTCTATAATAAATTAA
ATGAGAGTAAATAAAGTTTTCCGTTACGAATTAAAACCTAACGAAGTACAAAAACAAATTATGGCGCAGCATGCCGGATCGGCTCG
TTATGCTTATAATTGGGCTCTGGAAAAAATAAACAGTAAAGTTTTTAATACTACAAATGATAAAGATCTTTCTTTAAAAGAAAGAT
CTTGGATCTGTAAATCTTGTAATACAGATCATGATCGGGATCTGAATGCTGCAATTAACTTAAAGAAAATTGGAGTACTCTCTCAT
TCGAGAGGAATTTACGCCTGCGGAGACAGCTATGCTGGATGATCGTCTTGCGTTAATACCGCAAGACCTAAAAAGGTATCTGTCGT
TGACTGAACAGCGAAGTTGTGAAGACTTGAATCAGGAATTAGAAAGAGATCTGTTAAATGTTTAGATTTTTACAGATTTTCAGGAA
CGGCTTTAAATTTATATATGAATAAGAAAAAATTTAATGATGATTTTGATGAAATGGTATATAACTTATCAAAAATATTTAAAATG
AAAGATTCTGTTATTCCTTTTTCAAAAATACAATCCAGGCTTTATCAGTTACTAAGAGAAGACCGTTATAATATTTTGACT (SEQ
ID NO: 366)
>3300007960|Ga0099850_1017825_5|M
CTCTGCTTCTTCCTCCATGCGTTCCCGAATGTCGTGTTCGTCCCATTCCGGCGAACCAACAAATGCGTCTAGGAGCGCCGCCAACG
TGTGGCCGGGCTGCCAAGAATCAATCTCGGCTTCTGTCGGGAAATCTGCGGGGCGTGTGTTCATGTTCTGCCTGCCTCTCTCCGCC
TGCCAGCGGGATTGTTGGTGAAATGGACGGTGACATGTCTCAAGCCGTCCGGTACTCGGTGCGCCTGCCGTGCACTTCGTACTGAG
GTCAAGTATACTGCAAAATTCTGCACTTGTCAAGCATTAATTTGCGTGAGTTTCTTGACAGTCTGCACAAGTTTGCAGTATAATGG
ACTCATGAACAGAGCACACCGTATTAGACTAAATCCAACAACGGAGCAAGAAGAATACTTTTGGCAGTGTGCGGGGGTGTCTCGGT
TTACGTGGAACTGGGCATTAGCAGCGTATAACGATGGCGTTCCGTTTAGCTACTTAAAAACAGAGTTCAATCGTTTGCGCAGTGAA
GACGGGTTTGCCCCGTTTGTATCAGAGGTTCAAAGCTACGCATATCAGCAGGCGTCAAAGACTTGTAACGCTTGCGGGGAAAAGGT
AGATGCATTGCCGTTGTCGATTCGCCAGTGGGCTTGCCCGAGCTGCGGCGCAGAACACGACCGAGACGGGAATGCTGCCAAGAACA
TTAGAGACGAAGCCTTGCGAATGCGAGGATGATTGTCTAGCCTGCGGGAGTACTCACATCGTGGGCTTAAAAATGGCCTGGGGAGG
ATAGCACGTAGGTGCGCCGATGAACCAGGAACCTACACGCACATTACAAACGATAAACGCACGTGGAACAAACATGCATCGGGGAG
TTCATCCGCAGCGGGCACATTGACGACTGCA (SEQ ID NO: 367)
>3300025687|Ga0208019_1031224_1|M
AGTAAGCCTTGTACGCTGCCGTGCCCGGCACGAAGTACTGTTCCGGCACGAAGTGAATGCCGTTGGCGCAATCCTCTGCGCCCATG
CGCCGGTACTCTGCTTCTTCCTCCATGCGTTCCCGAATGTCGTGTTCGTCCCATTCCGGCGAACCAACAAATGCGTCTAGGAGCGC
CGCCAACGTGTGGCCGGGCTGCCAAGAATCAATCTCGGCTTCTGTCGGGAAATCTGCGGGGCGTGTGTTCATGTTCTGCCTGCCTC
TCTCCGCCTGCCAGCGGGATTGTTGGTGAAATGGACGGTGACATGTCTCAAGCCGTCCGGTACTCGGTGCGCCTGCCGTGCACTTC
GTACTGAGGTCAAGTATACTGCAAAATTCTGCACTTGTCAAGCATTAATTTGCGTGAGTTTCTTGACAGTCTGCACAAGTTTGCAG
TATAATGGACTCATGAACAGAGCACACCGTATTAGACTAAATCCAACAACGGAGCAAGAAGAATACTTTTGGCAGTGTGCGGGGGT
GTCTCGGTTTACGTGGAACTGGGCATTAGCAGCGTATAACGATGGCGTTCCGTTTAGCTACTTAAAAACAGAGTTCAATCGTTTGC
GCAGTGAAGACGGGTTTGCCCCGTTTGTATCAGAGGTTCAAAGCTACGCATATCAGCAGGCGTCAAAGACTTGTAACGCTTGCGGG
GAAAAGGTAGATGCATTGCCGTTGTCGATTCGCCAGTGGGCTTGCCCGAGCTGCGGCGCAGAACACGACCGAGACGGGAATGCTGC
CAAGAACATTAGAGACGAAGCCTTGCGAATGCGAGGATGATTGTCTAGCCTGCGGGAGTACTCACATCGTGGGCTTAAAAATGGCC
TGGGGAGGATAGCACGTAGGTGCGCCGATGAACCAGGAACCTACACGCACATTACAAACGATAAACGCACGTGGAACAAACATGCA
TCGGGGAGTAAATCGGCTTGTCGTCTTT (SEQ ID NO: 368)
>3300009089|Ga0099828_10012481_2|M
ACCACGAGGTTAAGCCTGCATATGTCAGAGCGCTGCGAGAGGCCGGGCTGATGGATCTCTCTGTTGACCAGGTGATCGAATTGAGC
GAGCATGAGATCAAACCTTCCTATCTCGCCAAATTGCGCGAGGCTGGATTGACCGATCTTACTTTTGACCAGGTCATCGAATTGAA
CGATCACGAGGTTAAGCCTGCGTATATCAAGGCGCTACGCGAGGCCGGGCTCGTTGACCTGACCTTCGACCAAGTGATTGAATTGA
GCGAACGAGAGGTTGATCCCGCTTATGTCAGGGCACTGCACGGCGAGATTCATTGATTTTCTCGTGAGGCAGATCACCCGGCGATA
CAGGATCTGCACAAGATCCTGACGCTATTGGGGTGACCTGTCTTTTTTTATCAAACCGCGCCATAAAACCCCTCGCTTCAGCGAAG
GGGATACAAGGCGCGTTCCTCTTGGGGCGCCTTGGGCACGGGGCTCGTGCCATTTCCGACTTGCTCTCTTAGAAACAGAATGGTAG
CATATGAGCAGGAGCTACTGCGAGGAGCAGACTGTGACGAAGCGAGCATACAAGTTCAGGTGTTATCCGACAGATGAGCAAAAGCA
GATTCTTGCTCGCACGTTCGGCTGCTGTCGCTGGGTCTACAATTGGGCGTTGCGTCTGAAAACCGATGCGATCAACATTCTGAATG
AAGCATTGAGAACTACCGGGAGTTACTCGGGAAGTCACGCCTATGGAGAGAGCAGCTCTGGCCTGGTCAGTGGATCAGGTGAAACT
GCTCTCGTCGAAATAGGAACCAACCTGCATGTAGGCATGTCCTAGATGTCTAAGTATTGGAGAACGGATTTTTATGAGCAAAGGTG
AGCAAACGAAAGAGAGAATCCTCGGACGAGCCGCGCAGCTTTTCAACCAGCAGGGATACTTCGGCTCGTCACTCTCCGATATCATG
CACGAAACGGGTTTGGAGAAGGGCGGTATCTATAATCATTTT (SEQ ID NO: 369)
>3300006417_501592_1|M
TGGGCAGGTCGCCAGACGATGGCGACGCGGTGGTGATGGCGTTCTGGGAAGAACCGCCTGAGCCGACCGGCGGCGTGGGGTTTGTG
CTGTAATGTTAAAAGCGCATGTGATCCGTCTCAACCCAACCGAAGAACAGGCCAGCTACTTCTGGCGCTGCGCGGGGATTGCTCGC
TTCACCTGGAATTGGGCGCTGGCTGAGTTGAACGCCGCCTATGACCGGGGTGAACGGCCTGCGATTGGAACCTGCAATGAGTGCGG
CCACGTCATGGCCGACATGCCGCTATCGGTGCGCTGGTGGCAGTGCCCGACCTGCGGCGCAGAACATGATCGGGACGGCAACGCAG
CGGTCAACATCCGCAACGAGGCCGTGAAGATGGCAGGCGCTGCCTAGTGCGCCCGTCGCGGTAGTAATCACGTCGAGACGCAAAAC
GCCTGGGGACGGTGTAGGTAGCAAACCGGATGAACCAGAAATTCACGCAATTGAATAGGTGAACAAGCATAACACCTGGAAGGAGT
GTCTCAGCGACACAACTAAGGACTGACCTATGACGATCCTCATCACCATGCGCGAGCCGAACCGGGAGGACGCC (SEQ ID NO:
370)
>3300025018|Ga0210043_1027795_3|M
TCGCTCGGCAAGAGCCAACTCCAGAACGCGCACGATCTGCCAGTTTAGCGGGCGACGTTCCTCTTGCGCCCACCTTTTCAGCGCGG
CGTGAAGCTCGGGCGGCAAGCGCAACAAGATGTTGATGGTCTTGGGTTTCTCTTTCTTTGCCATATCACCAGTATATCACAGTGAT
GCAAGATGGTATCAACCCAGGAGTCTTTGATGCTGAAGTTCCATCCCGTTGCCGAAATGAAAATCCGTGAGGACACATGAATCGTG
CTCATCGCATCCGGCTCAACCCGACAGCCGAGCAGGCGGCCTACTTTTGGCGCTGTGCCGGAGTCGCGCGCTTCACCTGGAACTGG
GCCCTGGGCGAATATAATGCCGCCCTCGCCCGCGGCGAAAAGCCAAGCCTCACCCCCAGTAGTAAAACGTGCAACGACTGCGGTCA
GATCGTCGAGTTGACCCTGGCCGAGCGCACCTGGACTTGCCCCCGCTGCGGGGTGATTCATGATCGAGATCTGAATGCCGCCCGGA
ATCTGCGAGACTACAGTGCAGTGACCGGTTAGGAATGCGCCGCCGGAGTACTCACACGGAGGCGTTAAACGCCTGTGGATGGTGGT
CGTAGTAGAGGCGCCAGATGAAGCAGGAGTTCACACATACGTGGATAGAATACGCGTTAGGGAACGCACGGCGTACCTGGCAAACG
GGGCCTCGG (SEQ ID NO: 371)
>3300017963|Ga0180437_10001136_84|M
AGAAGGTCGCACGCACTGAAACTTGATCCGAATGCCGGGCAGGCGCGGAAACTGCGGCTGTACTGCATCGCGCATTGCAAGATATG
GAATCATTTTCTTGAAAAGTGCAAAAAGGGCTTGATTCCGAAAAAAAGTAACGCGATGACGCATCAGCTCGGAAATAAAAGGATGG
ATAAGACCTGTCCGGAACTGCTGTGGGTCCGGGATGAGCTGGGAATGAACAAGCAGATTCAGCAGGTTCCATGCGAAGATCTGGAG
AAGGCATGGAAGCGATTCTTCGACTGGTGCAGGGCGAGAAAGAAGGGGAATGTCGGTCTGCAGACCTGCTTTCACTGCAAGCACGT
GAACGATTTCGTGACGCTGAATATGAAAACGTTCACCTGTCGCGGATGCGGACGAAAGATCGAGCGGGAATCGAATGCTGCCGCCA
ATGTCAGGGAGATGGGATTCAGTGAGCTTGGTCTTTAACAGTATTGAATGTCGCCGTCGGGCAGACGGAGACTCTAAACGCTCGCT
GAGCGGACGGCCGCTGTCGTGGAAGGATGTGCTCTTTCGCGTTCATGCTGACTGCGTTGAAGCGAGAATTTCTCTACGATTCGAGA
GGTGCGGTGACCTCAGGGTTGCCGTACCCTCTCGAATTTTTAAACTGATTTCCTGCAATGATTTAGGGAAATCTCATGTTCGACGC
AGCGCATTATGTGCGTATATTTATGGATCGCTCGAAAAGCGATATACAAGTAACTGTCAGCAACATGCTTATGCATGGAACGGTGT
GAATGCGTGAAATTGAGTAGAGGATATGTCAGTAAGGGTCGACCGTCGGGCATGCCGGAGGTGGCGTGTGTGAATGCGTGAAATTG
AGTAGAGGATATGTCAGACTT (SEQ ID NO: 372)
>3300006417|Ga0069787_10357475_9|M
CATCGCCAGCTTACCGGGCGCTGCCCAGTGTGCGGCGAGCCGGCTTTTGGACCCGGTGTCACGTGCAAACGGCTGACTTGCATATC
AGATTGGGTAGGCACCAACAAGGAGCACATCAAGGAGCACATCAATGACGAACCGACTGATTGACGCAAGAATCTGAAGCTGTTTC
CAAATTTGACAACGTAGGTATTTGTAGGTAAAATAAATACACCATGAACGCAACAGTCAAACCACTGAGCATCCGTGTCCCTCCTG
ATATGCGAGAAAAGATCAATCGCCTGGCCCAAAGCGAGCGCCGTTCCCAACACTCGATGATGTTGATTCTGCTTGAAGACGCGCTT
CTAAAGCGGAGCGTAGTAGAACAAGCACCATCGAGTGAAGCGACCGCATCTCTTGTTCTGCCAACGTTTCGATCTGCTGGCGCATC
TCAACAGGCAGACGCACGCTAAACGGGCCGTACTCTTGTTTGGTTCGTGGTTTCGCCATGTAGTTATTCTACCACCAAAACAGGTA
CACGGTCAACATGCTAAAAGCTCACGTGATTCGCCTCAACCCAACCAAAGAACAGGAAACGTATTTCTGGCGCTGCGCGGGGGTTG
CCCGCTTCACTTGGAATTGGGCGCTGGCCGAGTTAAACGCAGCTTACGAGAAAGGCGAGCGGCCTGCCGTTGGAACATGCAACGAC
TGCGGCTACGTGATGGCTGACATGCTGCTCTCGGTGCGCTGGTGGCAGTGCCCGGCCTGCGGTGCAGAACATGATCGGGACGGCAA
CGCGGCGGTCAACATCCGCAACGAAGCCGTAAAGATGGCAGGCGCTGCCTAGTGCGCCCGTCGCGGTAGTAATCACGTCGAGACGC
AAAACGCCTGGGGACGGTGTAGGTAGCGAACCGGATGAACCAGGAATCTACGCACACTAACAGGTGAACAGCACAATACCCGGAAG
GAAGATAAAGATAAAGCGGCCGCGCCGCCAATTTACCCCACGGTAGCGTGGAATTATAGGATTTTTAGCTATGGCTATGGACTGGT
TTCGCTCCTGGCACAACGCACCAACAGACCCAAAATGGCTGCTGATTGCACGCAAGGCCAACGTGCCACCCGGCATGGTGTCAGCC
GTTTTCTGGGCGCTACTCGACTATGCAAGCCAAGAGAAGGAACGTGGCAGCATA (SEQ ID NO: 373)
>3300014060|Ga0119967_10019787_9|M
TCGCTCGGCAAGAGCCAACTCCAGAACGCGCACGATCTGCCAGTTTAGCGGGCGACGTTCCTCTTGCGCCCACCTTTTCAGCGCGG
CGTGAAGCTCGGGCGGCAAGCGCAACAAGATGTTGATGGTCTTGGGCCTCTCTTTCTTTGCCATATCACCAGTATATCACAGTGAT
GCAAGATGGTACTAACCCAGGAGTCTTTGATGCTGAAGTTCCATCCCGTTGCCGAAATGAAAATCCGTGAGGACACATGAATCGTG
CTCATCGCATCCGGCTCAACCCGACAGCCGAGCAGGCGGCCTACTTTTGGCGCTGTGCCGGAGTCGCGCGCTTCACCTGGAACTGG
GCCCTGGGCGAATATAATGCCGCCCTCGCCCGCGGCGAAAAGCCAAGCCTCACCCCCAGTAGTAAAACGTGCAACGACTGCGGTCA
GATCGTCGAGTTGACCCTGGCCGAGCGCACCTGGACTTGCCCCCGCTGCGGGGTGATTCATGATCGGGACCTGAATGCCGCCCGGA
ATCTGCGAGACTACAGTGCAGTGACCGGTTAGGAATGCGCCGCCGGAGTACTCACACGGAGGCGTTAAACGCCTGTGGATGGTGGT
CGTAGTAGAGGCGCCAGATGAAGCAGAAATTCAGACCAGATGTGTGATCCATCAACAAGCCATGTCGAGAGCCTGCTGACCACCTT
TGAGCGCCTTGTGCGCGCTCAGTGGGCGACTACCGGCCGCGGCTCGGAGCATACTATCCGGGCCTACCTGACCGATACTCGCCAAC
ACCTGGCCTGGCTGGAA (SEQ ID NO: 374)
>3300017971|Ga0180438_10021976_11|M
CAGACCTGCTTTCACTGCAAGCACGTGAACGATTTCGTGACGCTGAATATGAAAACGTTCACCTGTCGCGGATGCGGACGAAAGAT
CGAGCGGGAATCGAATGCTGCCGCCAATGTCAGGGAGATGGGATTCAGTGAGCTTGGTCTTTAACAGTATTGAATGTCGCCGTCGG
GCAGACGGAGACTCTAAACGCTCGCTGAGCGGACGGCCGCTGTCGTGGAAGGATGTGCTCTTTCGCGTTCATGCTGACTGCGTTGA
AGCGAGAATTTCTCTACGATTCGAGAGGTGCGGTGACCTCAGGGTTGCCGTACCCTCTCGAATTTTTAAACTGATTTCCTGCAATG
ATTTAGGGAAATCTCATGTTCGACGCAGCGCATTATGTGCGTATATTTATGGATCGCTCGAAAAGCGATATACAAGTAACTGTCAG
CAACATGCTTATGCATGGAACGGGTGTCCAGCCGTTCAGCCAGACGACGACGC (SEQ ID NO: 375)
>3300020180|Ga0163155_10006838_6|M
CATCTCCGATGCGACGCGTTGCATCGCTTGCTCCAACGTCACCAGGCTCTGTGCCGTCAGGATCTTTCGGCGAAACTTCGTTACGA
AGACCAAGTGCACTAGGAGCTTGGTCACGCTGTGACGACCGCGATCGAGCGCTTGCATGGCCATGTTTTGCAGAGTATGGTCAGTT
GCAGACCAATGGCAACCGTTCGCTACCGATATCGACTTTACCCTACGCCTGCGCAGCGCGTGGCGTTGGCGAGGACGTTCGGTGCG
GTGCGGTTCGTGTGGAATCAAGAGCTTGCGCGATCGCAGATCCATGATGCTAAATACCAGGGCTTCAGTGCTAATGCTGCGAAGAA
CATTGTCGCGGCCGGGCAGGTCGAGACGAAAAACGGACGTGGAGGGCATGTGAGACGGATGGTGCCTTTGGGTATCTGCGCAGTGC
TCGATGAAGCGTCAACCTCGGGGCCGACCCCGGAATCCTCAGCCTTCTAGGCCGAGGAGGATGTCAAGGCATAGGTAAACCCTAAC
ATCGGGGCCCCTAACATCGGGGCCGTACGAGAAGATCTGTTCGTACCCGAATGCCCTTGCGGCATCGATCACGACTGTAGAGATTC
TCTTGCGCAGGGCGGTCAACCCTTTCAGGGACGATGTCGGAGATGTTTTTTTCAGTCGCACGTGTCGTTACCTCTCGGGTGGCAAC
CAGATCTTTCCTGGTTCAGCATCAGGCATCCGCCTTCGCCGCGCGCTTGGTGGCGGTGGGAAACGCAATGGGGAACAGCGCGGCGC
ACTGGCGCGCGTACTTGCGGGTGATGATCCACTGGCTCGCGCTGGTCGGCATCGGGGTTTCGCTCGGGCCGGCTCCTCGCCAGGCT
CTCACACGTACGACGCCCCGCCGCGCGCGTCCATTTCCCTCCTGGTGCGCTCAGGCGGTCAGGCAGCGCACGAGGAGGTGCTGTGG
AGCCCAGGAAGAGAGGCACCAGCGCACGAGGAGGTGCTGTGGAGCCCAGGAAGAGAGGCACCAGCGCACGAGGAGGTGCTGGTAGC
CATCGGGTAGGTCGAAAATATAAAAAACATCATCCAAGCGCATCAGGAGCCGCATAGCGCGACTTCTGATGCGCTTGCACCCCCGG
GGGTACTCGCTTGTACATGGTGGAGTATTCAGACGATGACAGCTGCACGCACCGACACCGACGACGACCTGATTGCACGGGCTGAG
GTCGCGAAGATCTTCGCCGTCGCCGAGGGCACCGTTTCCGCTTGGATGGTCCGCAAGGGTCCTCAGATCCCACCGCCCGTGATCCG
CGGCAAGAACTTC (SEQ ID NO: 376)
>3300028299|Ga0268276_1017374_4|M
ATGGAAAAGAAATGCAAAACTACTATTGTATTTTCTGCTGTCGCCAAAGATCTCCTGGTCGCGCTGGCTAAAAAGTATGGCCTGAC
TATGACGGCCACGCTGGAGATGATCCTTCGTGACAGGGCTAAACAGGAGGGTCCCTGGCAATAATCCGCACCCATTGTGCATCTAC
TGAAAAATACATAACATCGCCGAAATACTCATGCGGAGATGTAAAACGCCTGGGGATGGTCGAGGTTCAACTAAGCCAAATGAACC
AGGAATCCTACACTCGTTAGGTAATGAAAATGCACAGAGCACATCAAATTCGATTGAATCCAACGCCGGAACAGGAACAATATCTT
TGGCGTTGCGCTGGCGTGGCCCGCTTCACCTGGAATTGGGCGCTGGCGGCTTACAATGACACTCTGGCCCGCGGCGAGAAACCATC
AAGTAGCAAAACGTGCAACGACTGCGGTTATATCACCACGCTAACGTTGTCTGACCGCGTATGGACATGCCCGAATTGTGGCGTTG
TCCATGATCGAGATATCAATGCTGCGCAAAACCTGCGTGATTATCAGCCCGCTAGCGCAGCTTAATGGAACACGTCGCCGAGGTAC
TCACGCGGAGACGCTAAACGCCTAGGGATGGTAGTGGTAGTAGTCACGCCAAACGAACTAGGAGTTCACACACTCGTTAGGGTTCA
CCCCGCGAGTGCGTGGAGTGAGGGTGCGATAGAATACAGATAATGAAAGTTGAGTAATATTGATAGCTGATTCTGGGGCCTAACTC
GTGATCTATGCTACTGTTTGGTTACCTAAATCACCAAGTGGGATTGCCCGACTACTAAAAGCCGGTTATCCGTGTGCTCCGTTTGT
GTTTACGGAACAAGGTCGCCAACTAGCACTTGGTATCAAACGTCCGAATCCCTACATGGCCCAAGACACATTGCCAGATGGTCGCA
TCATTATCGTAGTAAGTGCTATCGCGATCAATGGAGAGGTACATGATAGATTGATACCCGACCCCATTGCGCTACCGATACCCATA
CTAAGTTGGATGCTAACCGCTAGTAGCGGCGGTACACGTCTAACAGTGGTATTTGATCTTCCCGCGGTTTGGCAGTACGTTGATAC
TTACCTGGCGTTTTTAGCCAGGGATTTCCATGACCAGTTCCACGCAATCCAAACTGCCCGCGCAGCATTGGTGAATGCTGATTGAT
TTATGAGGTTTCACATGAGCGAACGTAGAAATATTTCCGTACTGGTCGAAACCCGCAAAAAGGTCAGGCTCCTGGCCGCTACGCTG
GGAGTCAACATGGCCGAGGCCGTCGAACTAGCAGTTGCTAAACTGCTGGACGAGAGCACGCCCGGT (SEQ ID NO: 377)
>SRR6837571_682758_2|M
CGGCTTTGCTATGGCGTGCGTCAACTGGCGGCCCGGCGATACGCCCGCGCCCTACCAGGTCGAAGTGCTGGCGGCGCTGGCCGAGC
GGCGGCGGACCAGTGTGCGCGGGCCGCACGGGCTGGGCAAGACGGCGCTGGCCTCGCTGGCCATCCTGTGGTTTGCGCTGACCAGA
GACGGGGAAGACTGGAAGATACCGACCACCGCCAGCGCCTGGCGGCAATTGACCAAGTTCCTGTGGCCGGAGATCCACAAATGGGC
GGGCCGGCTGCGCTGGGAGTTGATCGGCCGCGACCCGCTGAACCGGCGCACGGAGCTGCTGACGCTCTCGATGAAGCTGCGCACAG
GGGAGGCATTTGCCCTGGCCTCGGACAATGCGGCGCTGATCGAAGGCGCGCACGCCGATCACCTGCTGTACCTGTTCGACGAAGCG
AAGGTTATCCCGCCGGCCACCTGGGACAGCGCAGAGGGCGCCATGTCTTCCGGTGACACCTACTGGCTGGCCATCTCGACGCCGGG
CGAGCCGGTGGGGCGCTTCTACGACATCCACCGGCGCCGGCCAGGCTATGAAGACTGGTGGGTGCGCCACGTGACCAAGACCGAAG
CCATCGCCGCCGGCCGCATCCGGGCCGATTGGGCCGAGAAGCGGCGCCAGCAGTGGGGCGAAACATCTGCCGTCTACCAAAACCGT
GTCGAGGGGCAATTCGCCAGCGGCGATGAAGACGGCGTTATCCCGCTGTCGTGGATCGAGGCGGCTAACGAGCGCTGGCACAGCCT
GAACGAGACGGACGGTTGGGGGCCGCTGCTGGCCGTGGGCGTGGACGTGGCGCGCTACGGGGAAGACCGCACGGTGCTGGCGCTCA
GGCACAGGCCGGGCGTCAAGGCGCTGCGCCGGCACGCCAAAGAGGATACGATGGCTACATCGGGCCGGGTGACGGGCATCCTGGAG
GCGCAAGGGGGCCGGGCCGTGGTGGACGTGATCGGCGTGGGTTCGGGCGTGGTCGACCGGCTGCGCGAGTTGGGCAAGCCGGTGCA
GGCGTTCAACTCAGCCGAGCGCACGGACAAGCGGGACGCCTCTGGCGAGCTGGGCTTTGCCGACAAGCGCGCGGCGGCCTACTGGC
AGGTGCGGGAGATGCTGGACCCGGCCAACGCGGACGCCATCGCCCTGCCGCCGGACGATCTGCTGACGGGCGACCTGACCGCGCCG
CACTGGCGGGTGCAGTCGGGCGGCAAAATCCGGGTGGAAAGCAAGGACGACATCCGGGCGCGGCTGGGCAGGTCGCCAGACGATGG
CGACGCGGTGGTGATGGCGTTCTGGGAAGAACCGCCTGAGCCGACCGGCGGCGTGGGGTTTGTGCTGTAATGTTAAAAGCGCATGT
GATCCGTCTCAACCCAACCGAAGAACAGGCCAGCTACTTCTGGCGCTGCGCGGGGATTGCTCGCTTCACCTGGAATTGGGCGCTGG
CTGAGTTGAACGCCGCCTATGACCGGGGTGAACGGCCTGCGATTGGAACCTGCAATGAGTGCGGCCACGTCATGGCCGACATGCCG
CTATCGGTGCGCTGGTGGCAGTGCCCGACCTGCGGCGCAGAACATGATCGGGACGGCAACGCAGCGGTCAACATCCGCAACGAGGC
CGTGAAGATGGCAGGCGCTGCCTAGTGCGCCCGTCGCGGTAGTAATCACGTCGAGACGCAAAACGCCTGGGGACGGTGTAGGTAGC
AAACCGGATGAACCAGGAGTTCACGCAATTGAATAGGTGAACAAGCATAACACCTGGAAGGAGTGTCTCAGCGACACAACTAAGGA
CTGACCTATGACGATCCTCATCACCATGCGCGAGC (SEQ ID NO: 378)
>3300020219|Ga0163146_10008638_12|M
GCTCTTGGCGTCGCTCCCCTCGAAGTCGGGCAGGTAGTCGTTGACGTTCTTCGCCACCACGTCAAACACTTCGCGTTCGGTGCGTT
CGATGATGCTTCTCGGCTCGCCCTCGAAGGGGTAGACCCGCTCCGCCTTCCACTGCTCGATCAACCCCCGAGCTTCCTGCACGCGA
CGTGCGCGGAAGTATAGTCTTGCGCAGACCAATGGCAAGCCTCCGCTACTCGTACCGCCTCTACCCGACGACGGAGCAGCGCCGCG
CGCTTGCTCAGACGTTCGGGTGTGTGCGTGTCGCGTGGAACGACGCTCTTGCTCAGTCTCAAGTGAGCGGTGCGAAGTACCCTGGG
TTCGCGGCGACGAGCAGACTCCTTACGGAGTCGAAGAAGTCGCCTGAGCGCGCGTGGTTGAACGACGTGTCCAGCGTCCCGGTGCA
GCAGTCGATCCGAAATCTCGACGTGGCCTTCCGCCGCTTCTTTAACGGGCTGAAAGGCAAGGGGCCGAAGGTCGGCTTTCCAACTT
GGAAGCGGAAGGACGGCAAGCAGTCCGCCGAGTTCAACGCCGCTAAGAACGTCGTGGCGGCAGGGCTTGCCGACACGGAAAACGGA
CGTGGAGAATGGGTAAGCCGGGTGGTGTCGATGGGCACTGGCGTTCCGTTCGTTGAAGCGTCAACCGCCGGGGCCTCCCCCGGAAT
CTCCGCCCTTTAGGGCGGGGAGGATGTCAACGGTACGGCTCGCCGGGAAAGATAGCCCAGGGCGTTTGTGGGGGTTCTCTAAAAAC
GGAAGTGTGTGAAAAAAATGGGCGCGTTTGCAGAGGGACGTCGCGCTGGTCCCCAACCCCCCTTGCCATGGGGCTTTTCTCATTCT
GCGAATCGCCCTTGCCATCGGCCCTTGGGCGCATGGCAAGGGCCCTGGGACGAGGGGGCCCTGGGACGAGGGGGCCCTGGGACGAG
GGGGCCCTGGGACGAGGGGGCCCTGGGACGAGGGGCCCTGGGGCGAGGGGCCCTGGGA (SEQ ID NO: 379)
>3300001380|JGI1356J14229_10025169_2|P
TTGGGGGGTTTGGAGTAGTTGTCCGGAGTCATGATGTTGAGGTTTTGCCGCGTGCCAAGGTCTATGCCAACCCTGTCCCCGATTTG
GCACCTGGCGCCAAGGTCAAGCGAATGCCCCCACACGCCCGTCTTGTCGCCAATGGACTCCACAAGGTATTTTGCAAACGGCCCGA
CCGACTGCTTGCTGCCCATGGAGAGCATGTAATACGCGCCAGCCGCACCTTCCACCTGGTCCAGCATCTTGAAGCTAAGCTGCACT
CCGGCATATTCGTTCTGGTAAAACGCATGGGCCTTGGGGCCCGCATACACTTTGGGGTCGATGCTCCTTCCCGCCCCGGTATTTTT
CATCGTGCTTGAAAGGTAGCCTGCACCGCCAAGGCCAACCCCTATCCGCCCCGCACCCGGCTTCCACACCCAGCCAAGGTTCAAAT
CCACCCCTACCGTGCCCATGAAGGCCTTGTCGGTTGGCGTCACCCCGCCTGGCAAATACATCTGCATCATCACTTTGGGCGAGTTG
CCATCGAACCCAATCTTGGAAAGGGCAAAATTTTTCCTGTTCACATTTCCAACCGCAAGCCCCATCGCGGAAATATTGAACCCTTC
CTCCGGCTTGTCCTGGTAGCCGAATGCAAATCCAAGGTATGGCACTTCGGAATCAAGCTGGGTCCTTTTTCCCCACGCGCCAATGA
GGTTCAGCGGGCTTTTCTCCACCCAGGCGGCAACGCCAAGGCCGTGCCCTAAATTGTACCCATAATATATCCCTGCCTGTGCGGCA
TCAGTCACTTTTGTCGCAACAGAAAATCCCATGTTGGAAAATGCGAAATTGGCCGACTCCTGCGCCATGGAAAACAGGCGCCCGGT
CCCCCGCTTCAAAAGCTCGGAATAGCTTATGTCAAGAAGCGCATTGGCCGCAGCTTCCAACCGGAGCCTGCCCGTTGTTTGGGCAT
CCGGCCCCCTTATTTTCTCAATTTCAACAAATTCGCTTTCCATCCCGTTGGCATAAAACGCCTGCTTCAGCGATGGAAGCGAGAGC
AGGCTGCCGGCAACGAGCTTCTGCGCCTTGTTGGATTTCCAATCTACATTTTGCACTTGCGGGAAGATTGTTCCCAAATCCATGGC
GCGGCTGCGTGTTGAGGAAAATGCGTTCTCCCCAGGTTTAGCCTCCATCGGAATTGCGCCATCCACCAGCCCGTCATCCTCCGGAA
CCGTGGTTGGCTTCTTTTTCCCAGCATCAGCAAGGTCATCCTCCGGAATCGTGGTCGGGATTTTCTTCTTTTTTGCCTCTTCCTCT
TCAGGCGGAACTGTGGAAGGCTTTTTCTTTCCTCCATCCACCAGCCCGTCATCCTCAGGAACAGTGGTTGGCTTCTTTTTCCCAGC
ATCAGCAAGGTCATCCTCCGGCACAGTGGTTGGCTTCTTCTTCCCAATATCAGCAAGCCCATCCTCCGGCACAGTGGTTGGCTTCT
TCTTCCCAATATCAGCAAGCCCATCCTCCGGAACCGTGGTCGGGATTTTTTTCTTTTTTGCCTCTTCCTCTTCAGGCGGAACTGTG
GAAGGCCTCTTCTTGGCGGCATCCGCCAAATCATCGCCAGGCACTGTGGATGGCGTTTTTTTCTTTCCAGCGTCTGCCACTACTGG
CGGCTGCTCGGCTTCGGGTTTTTCAGGCGCATCCTTTAGGGGAAGAGCAAGGCCGTGCGCTGCCATTCTCCTGTTCCATGCTTCAC
GCACCGCCAATGGCACGCGTTCACTCACGGCTTCGGCCGGATTTTTGCTATTTCGAATGGCCGCATCCGCCAACTTGATTATCATG
TCTTCTTTTTCCTTAGCAGTGCCCGCGCCTTTCATTTTCAGCAAATCCTGGGCGAATTTCCGAAACGAATCCCCCACCGCGATGCT
TTTGTTGCGCTCGGCAGGAACGCGCCTCCAATAGTCATCCTCGGTTATTTCCCCGGCGTTCACTTTCTTCGTGTTTCCATTCATGA
GGCCGTCATATTTTGCCCGTTCGATTTCCTTTGCCTTCTTCTCCGCCTGCCCAAGCTGCGCAGTTTCCCCGTATTTCACCGCCTGC
ATCAGGAAAAACATATTTTCATCCGACAACTGCTTTCAAATGGGCGATTTATTAATATGCATGGTGCGCGCTAAATCCAGCGAGTT
TTACATGGCACTCCGCCGCCTTAACTCCGGAGTTTTCGGAAAGCCCGGAAAGCCACCCTTTCGAAAGCCGTATATAAACCACATCA
TTCTTTTTTCCGGGATGTTCCAATGAGGTCATACAAATTCCGCATCTATCCTTCCAAGAATCAGGAAAAGGAAATGCTGCATCACT
TATGGGTTGCAAAAAACCTATGGAATGAATTACTTGCACACTGCAAATCATTCTATGCCTATTTCCAGAAATTCCCCTCAAAATCA
GCGCTGCAAATCATGTCAAAGAGTTCAGGTTTGTTTTCACAAACCTCACAGGAAATAGCGCACAGGGTGGAAAAGGCAATTTGGAG
ATTTGTCATGATGAAAAAGCAGGGTAATAAAGCAGGCTTCCCAAGGTTCAAGCCTTTTGAGAAAATGAAATCATTGCATTATCCGC
AATATGGAAACGGCTTTTTCCTTGATAAAACGCTTGAAGCCTCTCCATTTGGGAAAATCCAGATTGTAAGGCACTCGTGCGGCAAT
TCCCTTGACCGGGATATAAATGCCGCCCTGAACATACTCACACGAGCTACGGCCGGAATGGCCGGAAGTAACGCCTCCGGAGACGA
AACGATAATTCCGTCATTGAAGGAGGAAGCCCACGCCTTCACGCGTGGGTGATTCACCTTATTCGAGCGGCTTGCGCGCAAAAGCA
AGATACCCGGTGTGCGTGAGGCCGGTGTTTTCCGGGCGCACCCCCGCATCGCGCACCAGAATCTCGCGCATAATCACTTCGCAGCA
AAACGTGCCAGGGGAAAAGCC (SEQ ID NO: 380)
>3300022602|Ga0248169_134333_4|M
TAAAAGATGTAAAACACACTGTCAAAACACAGTTTGAAATTAATGTAATATACGAATTTTCATCTAGCAAATAACAATGGCTGTAC
ACCTACTTAATTCGCCAATCATGATGGACATGGGGACCTTCATACATGAGGGCCCTATTCGCCTTCCGGAAGTAGAAAGAATCATA
AAAAATGGCTTCATTTCTGGAATTACCCAGCTTGATACAGCCAGATACTTAACATCACTGTTGGGGGTTCATGTGGAATTTAAACC
AGTTATTACATTGCTCTTCAAAAATCACCCTTAACCTCTTAAGCATTTCTTTATTGATACATTGAGAGCGATATTTGGTTACTAAC
ACTAAATGATAATTTAGCTTATAAACAGCATGGAAGTGGCTTTTTGTAAGGGTATTTTTCATATTCACATATTAACACTAATTGAT
TTATCTGTTATAATAGATCCATGCTTTCGCACAAAGGATATGTTTACCGATTAAAGCCTAACGCTGAACAAGAACTCTTACTTGCC
CAGCATTTTGGCCATGTCCGCTTTGTTAAGAATTGACAAGATCTATAGCAAAAACTTGTCTCGCCGCCAGCTTCAAGATCACCTAG
TTAAAAAGAAGAAAAAGAGCAAATTTACATGGCTCAACGAGGTGAACTCTCAATCATTATTAGCAGCTCTATTGGACGTAGATAAT
GCTTTTAAGCGATTTTTTACACAAGGGGCTGGTCAATACACCAGGTCGCTAGGTACTTGCGAAACTGTAAAGCGCTCCCCAGTCTC
TATATCCGTTGGTGCGGATGAGTTTGCGAAAGGTTCCAAGAAGTTTGGAACGGGTCGGTTAGAAGAAGCTCCAGCTATAGCCGCTT
TAGCGGCTTAGCGGGAGTAGTTCACCTTCACCAGGTTGACGATGATTTCCAAATGAAGGCACCTTCAAAAGTCAGCCACTAATCTT
ATCCTCAATTTGCTTAATCACGCTTCTACCAGAATCATCTTTCACAGCAAATAGAAACAAGCATTTCCCTCTACTGGCTTTTTCCC
ATTGCAAGCCAATATTTTTCTTCTCTTGAGAATCATCATTGCTTGCATAAACCTCGCCCTTGTATTCAATCGCCATTATTCGGCCA
TCAGTAAGCTCAACAA (SEQ ID NO: 381)
>SRR1221442_902393_36|P
CCAAAGGTTGTAAAAGTTACAAAAACTGATTATACTCTTGACAATGATGATGTTTATGAACATACCTTTAAAAATAGAATAACAAT
TTATGTTAAGAGCAATCAAAATAAGATTATATCCAAACAAAACACAAGAACAAACACTAAATAAGGTGCTTGGTAGTTATCGTTTT
GTCTATAATCAAGTACTTGCTCAAAAACAAAATGCTTATAAACAAGACAAGACAAACCTAAAGGTAACTGATTTGTCAAAGTGGTT
TCACTGAACTCTGCTGAAGGATGAACATTATGCTTGGTTGAAAGAACAGAACACAAAGGTGATGAAACAAGCCATCAGACAGATGG
ACGGAGCGTACCAGAAGTTCTTCAAACAACATAACGGATTCCCAAAATTTAAATCCAAAAAGGATAAGCAATCCGCATTGTTCCCT
TATGAAGCTATTTCAAAACATAATACATTTGAAACAAGAACTTGTTCGGTTTGTGGTTACAAGAAACAAGATTTGAGGTTAAGTGA
CAGAGAATGGGTTTGTCCTAAATGTGGAACAAAACACAATAGAGATATAAATGCTGCTGTGAACATATTGTTGGAAGGACAACGAA
TGCTCACAGCAGGATAAGATAAAATGAAATACAGTAGGTGTCCGTAGCACCGAATTTACGCTTGTGGACTATCCTCCTATGGATGA
CCGTTCTGTAATGAACCTAAAAGTAGTGATAGATTGAAACAAGAAGTGAAATATACCTAAATCATAGATTTTCGTAGAATTTCATA
TACGGTAATTTCAATGATAACAGACTTACTTCTGATATGACAGAAGATGAATGTTATCTCTTGGTTACAGGTAAAACCAAGGCACA
ATACGAAGAAAGTAAAAGAAAAAGTGAAGAAGAATATCGAAGAAGAGAAGAAGAGGATAAGAAACAAATTCCAGAATTATGTAAGG
CATATGAGAAGGATTGGAGTTTCTACAGTCTTCTGTGTCTTGGTATTTGCAACTGCACCAAGATTTCTTTGAATAGGACGTCTAAC
TCTGTTTAAAGTTACACATGGTAATACTACTTTTTTCATATTATTTTTTAATTTATTTTATTGAATATTTGTCAAATTAGTGAAAC
TGCACGTTGATACATTACTGTTTCAATATATGTATCAATATCTCTTTTTTCAATGCCTATTGATACAAGTATGTCTGTCATCTGTT
CAACATCTTCTGAGTCAACACAAAGGACAAACCAACCTTTCTTGTCACT (SEQ ID NO: 382)
>3300025586|Ga0207996_1000986_11|P
GCGAATGACGATGTGAACGTGGTCGGCCTCGCCATTCAACTCAACGACCGTGAACGCCATCTCCGTCGCGACACGGCGCATCGCCG
CCTCGATCGTTGCGAGCCCTTTCGCGTCCAGGACCTTCCGCCGGTACTTCGTTACGCAGACCAAGTGGGCCAAAAACTTCGTAACG
CTGTGCCGCCCCTTGTCTAGCCCTTGCGTTTTCGCCACGCGGGCACCATACTCTCGTGCAGACCAATGACAAATCGTCTCCGCTAC
TCGTACCGCCTCTACCCCACGCCGGAGCAGCGCCATGCGCTCGCTCAGACGTTCGGCTGCGCGCGAGTGGTGTGGAACGACGCTCT
CGCCCGGGCTCAGGTGGGCGGTGCGAAGTACCCCGGTTTCGCCAATGCTGCCAAGAATGTTGTCGCGGCGGGGCTCGCCGAGACGA
AAAACGGACGTGGAGAATGGGTAAATCGGGTGGTGTCGATGGGCACTGGCGTTCCGTTCGTTGAAGCGTCAACCGCCGGGGCCTCC
CCCGGAGTCTCCGCCCTTTAGGGCGGGGAGGATGTCAACATCGACGCAAGACAAGACAGCTCTCTGCCGAGTCTAGCTGGCTTGAT
AGGGGAGGCTCTCGTCCTACGGTTACACACCCTTCTCCCTTTTTCGTGGCTATCTCCGATGCTCTTTCGGCCAAGATCTCCGAGGC
CCTGGAACTGATCGACTCCTTTGCGGAGCCCAAGCGCTCCGCCTGTCTTTGGAGCAGCGGCAAGGACTCCATGCTGCTGCTGCATT
TGCTCAGAAAGGCGGGGATCGACCTGAGGACTCTCTTTCTTCAGCGTCAGTCTACGAGGACTGAATGGCTTCCTCCTTAGCCGAAG
GCTTACGGATGTGGGAGCGAACGAAGCCAGCGCAAGCCGAAGGCTTACGGATGCGGCTGCTTAAGACGCTGCGCGTCTTTTCAACC
CTTCATACACCCTCTGCTGCCACCTCTTTTGATCCATTGCCAGCAGAGCGCAGGACGTACGCCGCTCTCGCATGTATCGATCCAGG
TGGCTGTCATCGTTTCGCAAGCCGAAGGCTTGCGGGGGTGAGAGCGATAGACCCTGCGCAAGCCGAAGGCTTACGGATGCGGGAGC
GAGAGACGCTGCGCAAGCCGAAGGCTTACGGATGCGGCTGCTTAAGACGCTGCGCGTCTTTTCACCCCACTGAGATGGGTGGCACA
TTCCTCCCGCATCCGATTGCTTGAGCACTGCAATGCGTTCTGCACCCACTTGTGGTTGACTCCCCTTGAAGCGCTCACTCCCCCTC
CTCCCGATCGTCTTCGCCCCAGCATTCCTTGCTTCCGTCGCGAAATCCCTCCAGGAAGCAGAATCCCTGCCACTCAGCCTCCCACC
TCTCGTCCAT (SEQ ID NO: 383)

### Example 8—Identification of Transactivating RNA Elements

[0427] In addition to an effector protein and a crRNA, some CRISPR systems described herein may also include an additional small RNA that activates robust enzymatic activity referred to as a transactivating RNA (tracrRNA). Such tracrRNAs typically include a complementary region that hybridizes to the crRNA. The crRNA-tracrRNA hybrid forms a complex with an effector resulting in the activation of programmable enzymatic activity.
[0428] tracrRNA sequences can be identified by searching genomic sequences flanking CRISPR arrays for short sequence motifs that are homologous to the direct repeat portion of the crRNA. Search methods include exact or degenerate sequence matching for the complete direct repeat (DR) or DR subsequences. For example, a DR of length n nucleotides can be decomposed into a set of overlapping 6-10 nt kmers. These kmers can be aligned to sequences flanking a CRISPR locus, and regions of homology with 1 or more kmer alignments can be identified as DR homology regions for experimental validation as tracrRNAs. Alternatively, RNA cofold free energy can be calculated for the complete DR or DR subsequences and short kmer sequences from the genomic sequence flanking the elements of a CRISPR system. Flanking sequence elements with low minimum free energy structures can be identified as DR homology regions for experimental validation as tracrRNAs.
[0429] tracrRNA elements frequently occur within close proximity to CRISPR associated genes or a CRISPR array. As an alternative to searching for DR homology regions to identify tracrRNA elements, non-coding sequences flanking CRISPR effectors or the CRISPR array can be isolated by cloning or gene synthesis for direct experimental validation of tracrRNAs.
[0430] Experimental validation of tracrRNA elements can be performed using small RNA sequencing of the host organism for a CRISPR system or synthetic sequences expressed heterologously in non-native species. Alignment of small RNA sequences from the originating genomic locus can be used to identify expressed RNA products containing DR homology regions and sterotyped processing typical of complete tracrRNA elements.
[0431] Complete tracrRNA candidates identified by RNA sequencing can be validated in vitro or in vivo by expressing the crRNA and effector in combination with or without the tracrRNA candidate and monitoring the activation of effector enzymatic activity.
[0432] In engineered constructs, the expression of tracrRNAs can be driven by promoters including, but not limited to U6, U1, and H1 promoters for expression in mammalian cells or J23119 promoter for expression in bacteria.
[0433] In some instances, a tracrRNA can be fused with a crRNA and expressed as a single RNA guide.

### Example 9—Identification of Novel RNA Modulators of Enzymatic Activity

[0434] In addition to the effector protein and the crRNA, some CRISPR systems described herein may also include an additional small RNA to activate or modulate the effector activity, referred to herein as an RNA modulator.
[0435] RNA modulators are expected to occur within close proximity to CRISPR-associated genes or a CRISPR array. To identify and validate RNA modulators, non-coding sequences flanking CRISPR effectors or the CRISPR array can be isolated by cloning or gene synthesis for direct experimental validation.
[0436] Experimental validation of RNA modulators can be performed using small RNA sequencing of the host organism for a CRISPR system or synthetic sequences expressed heterologously in non-native species. Alignment of small RNA sequences to the originating genomic locus can be used to identify expressed RNA products containing DR homology regions and sterotyped processing.
[0437] Candidate RNA modulators identified by RNA sequencing can be validated in vitro or in vivo by expressing a crRNA and an effector in combination with or without the candidate RNA modulator and monitoring alterations in effector enzymatic activity.
[0438] In engineered constructs, RNA modulators can be driven by promoters including U6, U1, and H1 promoters for expression in mammalian cells, or J23119 promoter for expression in bacteria.
[0439] In some instances, the RNA modulators can be artificially fused with either a crRNA, a tracrRNA, or both and expressed as a single RNA element.

### Example 10—Functional Validation of Engineered CLUST.342201 CRISPR-Cas System

[0440] Having identified components of CLUST.342201 CRISPR-Cas systems, a locus from the metagenomic source designated 3300006417 (SEQ ID NO: 301) was selected for functional validation.

### DNA Synthesis and Effector Library Cloning

[0441] To test the activity of the exemplary CLUST.342201 CRISPR-Cas system, the system was designed and synthesized using a pET28a(+) vector. Briefly, an E. coli codon-optimized nucleic acid sequence encoding the CLUST.342201 3300006417 effector (SEQ ID NO: 301 shown in TABLE 17) was synthesized (Genscript) and cloned into a custom expression system derived from pET-28a(+) (EMD-Millipore). The vectors included the nucleic acid encoding CLUST.342201 effectors under the control of a lac promoter and an E. coli ribosome binding sequence. The vector also included an acceptor site for a CRISPR array library driven by a J23119 promoter following the open reading frame for the CLUST.342201 effector. The non-coding sequence used for the CLUST.342201 3300006417 effector (SEQ ID NO: 301) is set forth in SEQ ID NO: 373, as shown in TABLE 19. A separate condition was tested, wherein the CLUST.342201 3300006417 effector (SEQ ID NO: 301) was individually cloned into pET28a(+) without the non-coding sequence. See FIG. 1A.

[0442] An oligonucleotide library synthesis (OLS) pool containing “repeat-spacer-repeat” sequences was computationally designed, where “repeat” represents the consensus direct repeat sequence found in the CRISPR array associated with the effector, and “spacer” represents sequences tiling the pACYC184 plasmid or E. coli essential genes. In particular, the repeat sequence used for the CLUST.342201 3300006417 effector (SEQ ID NO: 301) is set forth in SEQ ID NO: 342, as shown in TABLE 18. The spacer length was determined by the mode of the spacer lengths found in the endogenous CRISPR array. The repeat-spacer-repeat sequence was appended with restriction sites enabling the bi-directional cloning of the fragment into the aforementioned CRISPR array library acceptor site, as well as unique PCR priming sites to enable specific amplification of a specific repeat-spacer-repeat library from a larger pool.

[0443] Next, the repeat-spacer-repeat library was cloned into the plasmid using the Golden Gate assembly method. Briefly, each repeat-spacer-repeat was first amplified from the OLS pool (Agilent Genomics) using unique PCR primers and pre-linearized the plasmid backbone using BsaI to reduce potential background. Both DNA fragments were purified with Ampure XP (Beckman Coulter) prior to addition to Golden Gate Assembly Master Mix (New England Biolabs) and incubated per the manufacturer's instructions. The Golden Gate reaction was further purified and concentrated to enable maximum transformation efficiency in the subsequent steps of the bacterial screen.

[0444] The plasmid library containing the distinct repeat-spacer-repeat elements and CRISPR effectors was electroporated into E. Cloni electrocompetent E. coli (Lucigen) using a Gene Pulser Xcell® (Bio-rad) following the protocol recommended by Lucigen. The library was either co-transformed with purified pACYC184 plasmid or directly transformed into pACYC184-containing E. Cloni electrocompetent E. coli (Lucigen), plated onto agar containing chloramphenicol (Fisher), tetracycline (Alfa Aesar), and kanamycin (Alfa Aesar) in BioAssay® dishes (Thermo Fisher), and incubated for 10-12 hours at 37° C. After estimation of approximate colony count to ensure sufficient library representation on the bacterial plate, the bacteria were harvested, and plasmid DNA WAS extracted using a QIAprep Spin Miniprep® Kit (Qiagen) to create an “output library.” By performing a PCR using custom primers containing barcodes and sites compatible with Illumina sequencing chemistry, a barcoded next generation sequencing library was generated from both the pre-transformation “input library” and the post-harvest “output library,” which were then pooled and loaded onto a Nextseq 550 (Illumina) to evaluate the effectors. At least two independent biological replicates were performed for each screen to ensure consistency. See FIG. 1B.

### Bacterial Screen Sequencing Analysis

[0445] Next generation sequencing data for screen input and output libraries were demultiplexed using Illumina bcl2fastq. Reads in resulting fastq files for each sample contained the CRISPR array elements for the screening plasmid library. The direct repeat sequence of the CRISPR array was used to determine the array orientation, and the spacer sequence was mapped to the source (pACYC184 or E. Cloni) or negative control sequence (GFP) to determine the corresponding target. For each sample, the total number of reads for each unique array element (rₐ) in a given plasmid library was counted and normalized as follows: (rₐ+1)/total reads for all library array elements. The depletion score was calculated by dividing normalized output reads for a given array element by normalized input reads.

[0446] To identify specific parameters resulting in enzymatic activity and bacterial cell death, next generation sequencing (NGS) was used to quantify and compare the representation of individual CRISPR arrays (i.e., repeat-spacer-repeat) in the PCR product of the input and output plasmid libraries. The array depletion ratio was defined as the normalized output read count divided by the normalized input read count. An array was considered to be “strongly depleted” if the depletion ratio was less than 0.3 (more than 3-fold depletion), depicted by the blue dashed line in FIG. 31. When calculating the array depletion ratio across biological replicates, the maximum depletion ratio value for a given CRISPR array was taken across all experiments (i.e. a strongly depleted array must be strongly depleted in all biological replicates). A matrix including array depletion ratios and the following features were generated for each spacer target: target strand, transcript targeting, ORI targeting, target sequence motifs, flanking sequence motifs, and target secondary structure. The degree to which different features in this matrix explained target depletion for CLUST.342201 systems was investigated.

[0447] FIG. 31 shows the degree of interference activity of the engineered compositions, with a non-coding sequence, by plotting for a given target the normalized ratio of sequencing reads in the screen output versus the screen input. The results are plotted for each DR transcriptional orientation. In the functional screen for each composition, an active effector complexed with an active RNA guide will interfere with the ability of the pACYC184 to confer E. coli resistance to chloramphenicol and tetracycline, resulting in cell death and depletion of the spacer element within the pool. Comparison of the results of deep sequencing the initial DNA library (screen input) versus the surviving transformed E. coli (screen output) suggests specific target sequences and DR transcriptional orientations that enable an active, programmable CRISPR system. The screen also indicates that the effector complex is only active with one orientation of the DR. As such, the screen indicated that the CLUST.342201 3300006417 effector was active in the “reverse” orientation (5′-GTTC . . . ATGG-[spacer]-3′) of the DR (FIG. 31). The CLUST.342201 3300006417 effector did not retain activity in the absence of the non-coding sequence, indicating that CLUST.342201 effectors require a tracrRNA. Likewise, the negative control (plasmid without the effector) did not demonstrate activity.

[0448] FIG. 32A and FIG. 32B depict the location of strongly depleted targets for the CLUST.342201 3300006417 effector (plus non-coding sequence) targeting pACYC184 and E. coli E. Cloni essential genes, respectively. Flanking sequences of depleted targets were analyzed to determine the PAM sequence for CLUST.342201 3300006417. A WebLogo representation (Crooks et al., Genome Research 14: 1188-90, 2004) of the PAM sequence for CLUST.342201 3300006417 is shown in FIG. 33.

### Example 11—Identification of Components of CLUST.195009 CRISPR-Cas System

[0449] This protein family was identified using the computational methods described above. The CLUST.195009 system comprises single effectors associated with CRISPR systems found in uncultured metagenomic sequences collected from environments not limited to hypersaline lake, aquatic, landfill, soil, and wastewater environments as well as from Acidobacteria (TABLE 22). Exemplary CLUST.195009 effectors include those shown in TABLES 22 and 23, below. Examples of direct repeat sequences and spacer lengths for these systems are shown in TABLE 24. Optionally, the system includes a tracrRNA that is contained in a non-coding sequence listed in TABLE 25.

TABLE 224
Representative CLUST.195009 Effector Proteins

| | | # | effector | SEQ |
|---|---|---|---|---|
| source | effector accession | spacers | size | ID NO |
| hypersaline lake metagenome | SRR6201554_1444827_42\|M | 14 | 560 | 501 |
| Acidobacteria bacterium RBG_13_68_16 | OFV81970.1 | 8 | 523 | 502 |
| (MEKI01000059) | | | | |
| aquatic-freshwater-groundwater | 3300009448\|Ga0114940_10001413_14\|P | 2 | 552 | 503 |
| aquatic-marine-estuarine | 3300001245\|JGI12048J13642_11056368_2\|M | 14 | 560 | 504 |
| aquatic-marine-estuarine | 3300001245\|JGI12048J13642_11056369_15\|M | 14 | 560 | 505 |
| aquatic-marine-seawater | 3300027881\|Ga0255055_10005864_11\|P | 5 | 541 | 506 |
| aquatic-non marine saline and alkaline- | 3300001256\|JGI12210J13797_10707440_22\|P | 6 | 559 | 507 |
| hypersaline mat | | | | |
| aquatic-non marine saline and alkaline- | 3300001256\|JGI12210J13797_10707440_21\|M | 6 | 471 | 508 |
| hypersaline mat | | | | |
| aquatic-non marine saline and alkaline- | 3300001256\|JGI12210J13797_10707441_3\|P | 6 | 559 | 509 |
| hypersaline mat | | | | |
| aquatic-non marine saline and alkaline- | 3300001256\|JGI12210J13797_10707441_2\|M | 6 | 471 | 510 |
| hypersaline mat) | | | | |
| aquatic-non marine saline and alkaline- | 3300001256\|JGI12210J13797_11264632_33\|M | 14 | 560 | 511 |
| hypersaline mat | | | | |
| aquatic-non marine saline and alkaline- | 3300001256\|JGI12210J13797_11264634_48\|M | 14 | 560 | 512 |
| hypersaline mat | | | | |
| aquatic-non marine saline and alkaline- | 3300001357\|JGI11876J14442_10000221_42\|P | 14 | 560 | 513 |
| hypersaline mat | | | | |
| hypersaline lake metagenome | SRR6201554_128554_7\|P | 4 | 559 | 514 |
| hypersaline lake metagenome | SRR6201554_128554_6\|M | 4 | 471 | 515 |
| solid waste-landfill-landfill leachate | 3300014204\|Ga0172381_10020148_1\|P | 2 | 545 | 516 |
| solid waste-landfill-landfill leachate | 3300028603\|Ga0265293_10119881_1\|M | 5 | 538 | 517 |
| terrestrial-soil-agricultural soil | 3300009095\|Ga0079224_100009227_18\|M | 4 | 524 | 518 |
| terrestrial-soil-agricultural soil | 3300009095\|Ga0079224_100214048_3\|P | 3 | 558 | 519 |
| wastewater-industrial wastewater- | 3300002220\|MLSBCLC_10211263_4\|M | 4 | 476 | 520 |
| hydrocarbon resource environments | | | | |
| wastewater-industrial wastewater- | 3300002220\|MLSBCLC_10211263_3\|P | 4 | 530 | 521 |
| hydrocarbon resource environments | | | | |

TABLE 235
Amino acid sequences of Representative CLUST.195009 Effector Proteins

>SRR6201554_1444827_42|M
[hypersaline lake metagenome]
MRQTLTLCRPARLISSEVRLDQEYRAARWAHHRLLDFEDEHQRHLNQVAEAIVPGIVRVGRVIARLSRRAKRRSRATRGSWTPD
PRPQLMTSLRARLVEMKKQRDADPRWKAALAWGDDAVGAPKKVRRRRAKDPSKVKRRKNESDEAWANRFAMLTSDETAEHFEAK
VAAAPRRSRREEYRAALYAQRRCYHGTWNALVRSVDQARSDVLRQRRSGLPADWRRPRFGGSQSICADRSGFRVVERGKPWWVV
EMRIGTASGKGAEWVRLRAKCGNWHAIPDDAAITTAKLTRRKDGQRWSYSLSLTVDGAQKAARAASSSGLVSFDWGHREHGHPR
ARDGIRAFVWLGDDGSTGEVIIPAECRQCLDEIDALKSRVDQAFDARRESMGLRDKNRHTYRRRVLRSGVRTEEEAQWLTWETR
YERRVARLRKRWQSLRREAYTRAVRELRTQYARFAFETESSASLKRQQRDEHMRRRARANRDLTARYEFVSLCERFGAEIIPVS
ARNTTKECPSCGHLGDNTSELVTVCPACGTARDKDVGAAEVILRRAEEALAKHSAE (SEQ ID NO: 501)
>OFV81970.1
[Acidobacteria bacterium RBG_13_68_16]
MTIRVIHRPAKVVDGLEALDREFRSARWAHHQLLRIEDDQAEQLDLVADMCAPGLRRVGRILAKLRRRACRAERATGWSPNPRV
ELRKTMAARMRSLKAQRDADPRWKIARGWLDASADDAPVKACRRKAGESDALYDARVARRKRRSRREEKRLELYSQIRCHYDTW
NELVKQVDQAIRSVRAVRKTGQSARWKHPRYDDPTTIASDHWDLVERGPVWWVIDLKLRAGVRVRLRTKAGTYDGVPADPDFRT
LKLTRRRVGRFGWEYSCSIAVNLAERVPSGTGVVALDWGHREHGHATADQGIRVFTWAGDDGQTGEVLLPIACRDLLSELDELK
GRLDTVYAARGEPELNRARYRRRLNMCGVLTREEQDWLRWETRQDRRLSAMRDRIEHIRRESYLKAIHELGRRYRVFAFEDLQG
QQIKDLQTENQMGRRKRQNRDLSARYLFESLCKQSGAERITVPARNSTRQCPACGKLREKTADLLVACDACGYVGDRDRDACRT
LLARAKEALAKRGASVQND (SEQ ID NO: 502)
>3300009448|Ga0114940_10001413_14|P
[aquatic-freshwater-groundwater]
MLTLNRPALLESDEQRLDAEYRSTNWAHHRLLDFEQEHQRVLDAAADEIAPGIIRAGRIVARLARRAKRADRTTGGQWFPPPRS
ELCTRLRVLLGELREQRNADPRWKLALGWADEQVGEPKAPRRRRAKPSSAVKRRKAETDDAFAKRFALLTSDESAEHYAAKLAT
PPRDSRRDMARKALYQQRRIYWGTWNALIRSVDQARKDVLDHRKRGMPADLRRPKFRDPSSIAADAGGFRIVERGALWWTIEMR
IGLGDEWARVRAKCGNWHAIPSDAKIGTAKLTRRRDGHRWSYSLSLTVDVAKNVDAHAPRGVVSFDWGHREHGHPSWRDGIRAF
TWLGDDGATGEVLIPIECRQALDEIDAMKARVDGAFNARKKAHDLPDVNRYTYRQRLMASGVRTEEQTAWLRWEMRYERRMDAR
RDRVQNLRKDAYTRAVRELRSRYAVFAFEDEDGASIRREQKEEQVLRRKRSNRDLATRYEFVALCERYGAELIAVPARNTTREC
PDCGELLKENGPELLVVCPGCGTARDKDHGAARVILGRAKEALAKRAA (SEQ ID NO: 503)
>3300001245|JGI12048J13642_11056368_2|M
[aquatic-marine-estuarine]
MRQTLTLCRPARLISSEVRLDQEYRAARWAHHRLLDFEDEHQRHLNQVAEAIVPGIVRVGRMIARLSRRAKRRSRATRGSWTPD
PRPQLMTSLRARLVEMKKQRDADPRWKAALAWGDDAVGAPKKVRRRRAKDPSKVKRRKNESDEAWANRFAMLTSDETAEHFEAK
VAAAPRRSRREEYRAALYAQRRCYHGTWNALVRSVDQARSDVLRQRRSGLPADWRRPRFGGSQSICADRSGFRVVERGKPWWVV
EMRIGTASGKGAEWVRLRAKCGNWHAIPDDAAITTAKLTRRKDGQRWSYSLSLTVDGAQKAARAASSSGLVSFDWGHREHGHPR
ARDGIRAFVWLGDDGSTGEVIIPAECRQCLDEIDALKSRVDQAFDARRESMGLRDKNRHTYRRRVLRSGVRTEEEAQWLTWETR
YERRVARLRKRWQSLRREAYTRAVRELRTQYARFAFETESSASLKRQQRDEHMRRRARANRDLTARYEFVSLCERFGAEIIPVS
ARNTTKECPSCGHLGDNTSELVTVCPACGTARDKDVGAAEVILRRAEEALAKHSAE (SEQ ID NO: 504)
>3300001245|JGI12048J13642_11056369_15|M
[aquatic-marine-estuarine]
MRQTLTLCRPARLISSEVRLDQEYRAARWAHHRLLDFEDEHQRHLNQVAEAIVPGIVRVGRMIARLSRRAKRRSRATRGSWTPD
PRPQLMTSLRARLVEMKKQRDADPRWKAALAWGDDAVGAPKKVRRRRAKDPSKVKRRKNESDEAWANRFAMLTSDETAEHFEAK
VAAAPRRSRREEYRAALYAQRRCYHGTWNALVRSVDQARSDVLRQRRSGLPADWRRPRFGGSQSICADRSGFRVVERGKPWWVV
EMRIGTASGKGAEWVRLRAKCGNWHAIPDDAAITTAKLTRRKDGQRWSYSLSLTVDGAQKAARAASSSGLVSFDWGHREHGHPR
ARDGIRAFVWLGDDGSTGEVIIPAECRQCLDEIDALKSRVDQAFDARRESMGLRDKNRHTYRRRVLRSGVRTEEEAQWLTWETR
YERRVARLRKRWQSLRREAYTRAVRELRTQYARFAFETESSASLKRQQRDEHMRRRARANRDLTARYEFVSLCERFGAEIIPVS
ARNTTKECPSCGHLGDNTSELVTVCPACGTARDKDVGAAEVILRRAEEALAKHSAE (SEQ ID NO: 505)
>3300027881|Ga0255055_10005864_11|P
[aquatic-marine-seawater]
MMKALARPARLVTGQAELDAEMRSARWIYHRLLDFEDAHQQVLDAAAEAVAPGISRVARLVARLLRRTRRRERTASSSWSPNPH
SAWLAGLRAQLNALRKVRNAHQVWRDAVKWADTPAPGAPERGGPRRRAGETAEEFAARCATRRTMLTRREAWRAELYRGHVADG
ARGRSRIYWGTWNSLLKSVDQARKSVLQARKAGLPANWRRPQWNDPSTIAADAGGFRVLERGRPWWALETRLCDGWVRFRAKCG
NWHSIPESAKLRTLKLTRRKNGCGWSYSVSIAVAGMPEPAHAGDGVVALDWGYREHGHPHERDGLRVFTWRGEDGAIGEILLPS
ECRAAKDREQQLQARIDAIWNARCASMKLPERNRHSYRSRLMRSGVRTAEEQRWLNWETRYERRRAAARKRWQNLRSETYLQAV
HALRRRYDMFAVENETIVGHRRTDKDEQTRHRKRQNRELSARYEFLQICERSGATILPVPSRNSTRECPHCGGLHENGPELYRA
CPATGVVDDKDEIACVTILARAKAALANRAVSAEKHA (SEQ ID NO: 506)
>3300001256|JGI12210J13797_10707440_22|P
[aquatic-non marine saline and alkaline-hypersaline mat]
MTILTLNRPALIISDDVRLDAEFRAARWAHHRLLDFEDQHQRHLDEEAERCAPGIVRVGRIIARLSRRAKRMSRATRGSWTPDP
RPQLMASLRVRLAEMKTQRDADPRWKAALAWADEPIGAPKKVRRRRAKDPSKVKRRKSETDEAFEKRFALFTSDETEEHYQKKV
AAAPRRTRREEYRAELYTKRRCYWGTWNALLRSVDQARSDVLTQRKKGLPADWQRPRFGDAQSLSAESGGFRIVERGKLWWVID
LRIGTATGKNAEWVRVRAKCGNWHHIPEGASITTAQLTRRKDGQRWSYSLSLTVDGAQKSAREVSNTGLVSFDWGHREHGHGRA
KEGIRAFVWIGDDGQQGEVILPAECRRCLDEIDALKSRMDQAFDARRESMGLREKNRHTYRRRLLRSGVQTDEEGQWLTWEMRY
ERRVGRLRKRWQNLRKETYVQAVRALRSRYAQFAFESESNASLKRQQKDEQMLRRARANRDLTARYEFVSLCERFGAEIVPVSA
RNTTKECPSCGHLGDNTAELVTVCPACGTARDKDFGAAKVIFRRAEGALAKHAAE (SEQ ID NO: 507)
>3300001256|JGI12210J13797_10707440_21|M
[aquatic-non marine saline and alkaline-hypersaline mat]
MASLRVRLAEMKTQRDADPRWKAALAWADEPIGAPKKVRRRRAKDPSKVKRRKSETDEAFEKRFALFTSDETEEHYQKKVAAAP
RRTRREEYRAELYTKRRCYWGTWNALLRSVDQARSDVLTQRKKGLPADWQRPRFGDAQSLSAESGGFRIVERGKLWWVIDLRIG
TATGKNAEWVRVRAKCGNWHHIPEGASITTAQLTRRKDGQRWSYSLSLTVDGAQKSAREVSNTGLVSFDWGHREHGHGRAKEGI
RAFVWIGDDGQQGEVILPAECRRCLDEIDALKSRMDQAFDARRESMGLREKNRHTYRRRLLRSGVQTDEEGQWLTWEMRYERRV
GRLRKRWQNLRKETYVQAVRALRSRYAQFAFESESNASLKRQQKDEQMLRRARANRDLTARYEFVSLCERFGAEIVPVSARNTT
KECPSCGHLGDNTAELVTVCPACGTARDKDFGAAKVIFRRAEGALAKHAAE (SEQ ID NO: 508)
>3300001256|JGI12210J13797_10707441_3|P
[aquatic-non marine saline and alkaline-hypersaline mat]
MTILTLNRPALIISDDVRLDAEFRAARWAHHRLLDFEDQHQRHLDEEAERCAPGIVRVGRIIARLSRRAKRMSRATRGSWTPDP
RPQLMASLRVRLAEMKTQRDADPRWKAALAWADEPIGAPKKVRRRRAKDPSKVKRRKSETDEAFEKRFALFTSDETEEHYQKKV
AAAPRRTRREEYRAELYTKRRCYWGTWNALLRSVDQARSDVLTQRKKGLPADWQRPRFGDAQSLSAESGGFRIVERGKLWWVID
LRIGTATGKNAEWVRVRAKCGNWHHIPEGASITTAQLTRRKDGQRWSYSLSLTVDGAQKSAREVSNTGLVSFDWGHREHGHGRA
KEGIRAFVWIGDDGQQGEVILPAECRRCLDEIDALKSRMDQAFDARRESMGLREKNRHTYRRRLLRSGVQTDEEGQWLTWEMRY
ERRVGRLRKRWQNLRKETYVQAVRALRSRYAQFAFESESNASLKRQQKDEQMLRRARANRDLTARYEFVSLCERFGAEIVPVSA
RNTTKECPSCGHLGDNTAELVTVCPACGTARDKDFGAAKVIFRRAEGALAKHAAE (SEQ ID NO: 509)
>3300001256|JGI12210J13797_10707441_2|M
[aquatic-non marine saline and alkaline-hypersaline mat]
MASLRVRLAEMKTQRDADPRWKAALAWADEPIGAPKKVRRRRAKDPSKVKRRKSETDEAFEKRFALFTSDETEEHYQKKVAAAP
RRTRREEYRAELYTKRRCYWGTWNALLRSVDQARSDVLTQRKKGLPADWQRPRFGDAQSLSAESGGFRIVERGKLWWVIDLRIG
TATGKNAEWVRVRAKCGNWHHIPEGASITTAQLTRRKDGQRWSYSLSLTVDGAQKSAREVSNTGLVSFDWGHREHGHGRAKEGI
RAFVWIGDDGQQGEVILPAECRRCLDEIDALKSRMDQAFDARRESMGLREKNRHTYRRRLLRSGVQTDEEGQWLTWEMRYERRV
GRLRKRWQNLRKETYVQAVRALRSRYAQFAFESESNASLKRQQKDEQMLRRARANRDLTARYEFVSLCERFGAEIVPVSARNTT
KECPSCGHLGDNTAELVTVCPACGTARDKDFGAAKVIFRRAEGALAKHAAE (SEQ ID NO: 510)
>3300001256|JGI12210J13797_11264632_33|M
[aquatic-non marine saline and alkaline-hypersaline mat]
MRQTLTLCRPARLISSEVRLDQEYRAARWAHHRLLDFEDEHQRHLNQVAEAIVPGIVRVGRMIARLSRRAKRRSRATRGSWTPD
PRPQLMTSLRARLVEMKKQRDADPRWKAALAWGDDAVGAPKKVRRRRAKDPSKVKRRKNESDEAWANRFAMLTSDETAEHFEAK
VAAAPRRSRREEYRAALYAQRRCYHGTWNALVRSVDQARSDVLRQRRSGLPADWRRPRFGGSQSICADRSGFRVVERGKPWWVV
EMRIGTASGKGAEWVRLRAKCGNWHAIPDDAAITTAKLTRRKDGQRWSYSLSLTVDGAQKAARAASSSGLVSFDWGHREHGHPR
ARDGIRAFVWLGDDGSTGEVIIPAECRQCLDEIDALKSRVDQAFDARRESMGLRDKNRHTYRRRVLRSGVRTEEEAQWLTWETR
YERRVARLRKRWQSLRREAYTRAVRELRTQYARFAFETESSASLKRQQRDEHMRRRARANRDLTARYEFVSLCERFGAEIIPVS
ARNTTKECPSCGHLGDNTSELVTVCPACGTARDKDVGAAEVILRRAEEALAKHSAE (SEQ ID NO: 511)
>3300001256|JGI12210J13797_11264634_48|M
[aquatic-non marine saline and alkaline-hypersaline mat]
MRQTLTLCRPARLISSEVRLDQEYRAARWAHHRLLDFEDEHQRHLNQVAEAIVPGIVRVGRMIARLSRRAKRRSRATRGSWTPD
PRPQLMTSLRARLVEMKKQRDADPRWKAALAWGDDAVGAPKKVRRRRAKDPSKVKRRKNESDEAWANRFAMLTSDETAEHFEAK
VAAAPRRSRREEYRAALYAQRRCYHGTWNALVRSVDQARSDVLRQRRSGLPADWRRPRFGGSQSICADRSGFRVVERGKPWWVV
EMRIGTASGKGAEWVRLRAKCGNWHAIPDDAAITTAKLTRRKDGQRWSYSLSLTVDGAQKAARAASSSGLVSFDWGHREHGHPR
ARDGIRAFVWLGDDGSTGEVIIPAECRQCLDEIDALKSRVDQAFDARRESMGLRDKNRHTYRRRVLRSGVRTEEEAQWLTWETR
YERRVARLRKRWQSLRREAYTRAVRELRTQYARFAFETESSASLKRQQRDEHMRRRARANRDLTARYEFVSLCERFGAEIIPVS
ARNTTKECPSCGHLGDNTSELVTVCPACGTARDKDVGAAEVILRRAEEALAKHSAE (SEQ ID NO: 512)
>3300001357|JGI11876J14442_10000221_42|P
[aquatic-non marine saline and alkaline-hypersaline mat]
MRQTLTLCRPARLISSEVRLDQEYRAARWAHHRLLDFEDEHQRHLNQVAEAIVPGIVRVGRMIARLSRRAKRRSRATRGSWTPD
PRPQLMTSLRARLVEMKKQRDADPRWKAALAWGDDAVGAPKKVRRRRAKDPSKVKRRKNESDEAWANRFAMLTSDETAEHFEAK
VAAAPRRSRREEYRAALYAQRRCYHGTWNALVRSVDQARSDVLRQRRSGLPADWRRPRFGGSQSICADRSGFRVVERGKPWWVV
EMRIGTASGKGAEWVRLRAKCGNWHAIPDDAAITTAKLTRRKDGQRWSYSLSLTVDGAQKAARAASSSGLVSFDWGHREHGHPR
ARDGIRAFVWLGDDGSTGEVIIPAECRQCLDEIDALKSRVDQAFDARRESMGLRDKNRHTYRRRVLRSGVRTEEEAQWLTWETR
YERRVARLRKRWQSLRREAYTRAVRELRTQYARFAFETESSASLKRQQRDEHMRRRARANRDLTARYEFVSLCERFGAEIIPVS
ARNTTKECPSCGHLGDNTSELVTVCPACGTARDKDVGAAEVILRRAEEALAKHSAE (SEQ ID NO: 513)
>SRR6201554_128554_7|P
[hypersaline lake metagenome]
MTILTLNRPALIISDDVRLDAEFRAARWAHHRLLDFEDQHQRHLDEEAERCAPGIVRVGRIIARLSRRAKRMSRATRGSWTPDP
RPQLMASLRVRLAEMKTQRDADPRWKAALAWADEPIGAPKKVRRRRAKDPSKVKRRKSETDEAFEKRFALFTSDETEEHYQKKV
AAAPRRTRREEYRAELYTKRRCYWGTWNALLRSVDQARSDVLTQRKKGLPADWQRPRFGDAQSLSAESGGFRIVERGKLWWVID
LRIGTATGKNAEWVRVRAKCGNWHHIPEGASITTAQLTRRKDGQRWSYSLSLTVDGAQKSAREVSNTGLVSFDWGHREHGHGRA
KEGIRAFVWIGDDGQQGEVILPAECRRCLDEIDALKSRMDQAFDARRESMGLREKNRHTYRRRLLRSGVQTDEEGQWLTWEMRY
ERRVGRLRKRWQNLRKETYVQAVRALRSRYAQFAFESESNASLKRQQKDEQMLRRARANRDLTARYEFVSLCERFGAEIVPVSA
RNTTKECPSCGHLGDNTAELVTVCPACGTARDKDFGAAKVIFRRAEGALAKHAAE (SEQ ID NO: 514)
>SRR6201554_128554_6|M
[hypersaline lake metagenome]
MASLRVRLAEMKTQRDADPRWKAALAWADEPIGAPKKVRRRRAKDPSKVKRRKSETDEAFEKRFALFTSDETEEHYQKKVAAAP
RRTRREEYRAELYTKRRCYWGTWNALLRSVDQARSDVLTQRKKGLPADWQRPRFGDAQSLSAESGGFRIVERGKLWWVIDLRIG
TATGKNAEWVRVRAKCGNWHHIPEGASITTAQLTRRKDGQRWSYSLSLTVDGAQKSAREVSNTGLVSFDWGHREHGHGRAKEGI
RAFVWIGDDGQQGEVILPAECRRCLDEIDALKSRMDQAFDARRESMGLREKNRHTYRRRLLRSGVQTDEEGQWLTWEMRYERRV
GRLRKRWQNLRKETYVQAVRALRSRYAQFAFESESNASLKRQQKDEQMLRRARANRDLTARYEFVSLCERFGAEIVPVSARNTT
KECPSCGHLGDNTAELVTVCPACGTARDKDFGAAKVIFRRAEGALAKHAAE (SEQ ID NO: 515)
>3300014204|Ga0172381_10020148_1|P
[solid waste-landfill-landfill leachate]
MKTLSRPAVIVDGIDDLGREYSSARWIYHRLLDFEDTHQSVLAAAAERAAPGITRVGRIVSRLSRRIRWSERSTGWSPPLHTPW
LTSLRARLIELRAERNASDGWREAMCWADDSEPGAPARGGARRKAGETDEDFAARSAKRRTTLTRREAHRAALYAEHVAVGSSG
RSRIHWGTWNGLVKSVDQARAAVLKARKQGLPAEWRRPRWSDDSTLFADTHGFRIVSKDDSGPWWTLELRTHFGWVRFRAKCGN
WHEIPESASMRTLKLTRRQKTLGSSGRSTRKGWAYSVSIAIEGVEPAAHTGAGLVALDWGHREHGHPHESEGIRAFTWLGDDGA
LGEILLPRECREATDAVDEMKARVDGAFNARKSALGLPDRNRHRYRSRLMRAGVRTDEEQLWLTWEDRYEMRMQRARKRVKNLR
QETYLKAVRMLRSRYSQFAIEDESIMRHRAADIDKETSHRKRSNRELTARYLFVSICERLGAEMIPVPARNSTRECPKCGHLDE
NTAELIIVCGGCGTARDKDHGAVQVILRRAKEALEKRLASP (SEQ ID NO: 516)
>3300028603|Ga0265293_10119881_1|M
[solid waste-landfill-landfill leachate]
MKTLSRPAVVDRDTATRLDREYTAARWLHNRILDFEAEHQRVIDAAADTAAPGISRCARIVAKLRGRVRRRERSTGWSPPLHEE
WRKILEARIAELRKARNADPAYQAALRWDRESAPGAVVKLPRRKAGETDEAFAARKAAGKTRSRREAWRTEVCYPQRRCFISSY
NALCRIVDQARSAVLAERKAGRPAEWRRPRHSDPTATLHWEPGSWEIVDMGPVWWTIRLAVGYSDRQTKADHVTVRAKCGTWHD
TTGREFATAKLTRIRDGRGYRYSLSLCVDVAAAPLPGDGVVGLDWGHREHGHPEQDEGIRAWSWHGDDGRSGVVILPAEIREQL
DRVHELQSRIDTVWDARRREQKLPERSRQGYRTRLLREGAPTAEEAAWLDWETRYERRAQRSRQRVQALRRETYLRAVRELRQR
YRVFAVEDQPGRAHRDLDTEEQTRRRKRENRDVVARYEFLSICERLGADVIPVPARDTTRECPDCGHLAERTSDLTIACVSCGR
VRDRDAGAARVILRRGIEALANRAAKARNSEAAE (SEQ ID NO: 517)
>3300009095|Ga0079224_100009227_18|M
[terrestrial-soil-agricultural soil]
MIFAIKRPGILESDPSALDTELRAARRTHHLLLDFEDKHQALLDEVAETVAPGIGRIARIVNKLISRKHRMERSTGWSPPLHDN
WRLVLKDRLQSLRNQRNSDPRWKTALKWADMPGENAPPRGGARRKVGETDEAFAARVSSRRTVLTRREAYRAELYTGRTIYWGT
WNGLLKQVDQARSMVVSQRAAGLPAEWHRPRWDKPTTLYADRGGFTVHRENKHWVVDIRLLKGSARFRLSTRGKISDNFTEFRT
AKVTRFKNGAGWSYSVSLTVSSESSLPAVGAGVVAFDGGYRERGHDAEQQGIRALVWTGNDGKSGEVLLPLACRTLADQNKQLL
SKLDTEFTQLNVPFRSRHHYRSALMRAGVRTELEHAWLGDERRIERRVAANRKRIENLRKETYLRVVKELLASYGTFVFEDTSG
QALRDIGTDKQALRRSRQNRDMVAEYSFRKLIERRGGNVITVTARNSTRECPTCGYLCESTAQISIKCPACSTIRDQDFGASQV
LLRRGLEALEKHNSNTRIAS (SEQ ID NO: 518)
>3300009095|Ga0079224_100214048_3|P
[terrestrial-soil-agricultural soil]
MLVLHRPAKLESDERRLDQEYRSARWLHHRILDFEDEHQRVLDTVAEQIAPGVVRIGQILARLNGRARRAERSSKGVWCPNPHP
DLAERLKARLQELRKVRDADPRWKAATKWPDEEIGEPKQVRRRRAKPASKIQRRKSESEEAFRKRFELLTQDESDEHYAQKLAN
ARRDSRRDVHRKKLYAERRIYWGTWNSLCERVDAARQAVLKRRKQGLPAEWRRPRWDQSNTIAAPAAGFRIVEQGPLWWTAEMR
LGTGDGNEAEWVRFRFKGGNWHKLGPEAKLVACELTRRRDGMRWNYSVSITVDGVTKASAPAATTRCVAFDWGHREHGHDRARE
GIRAFVWVGDDGRSGEVLIPRECREAQDEIDALKSRVDTAFLARKQSLELLDHTRYSYRRRLTRSGCCTREESAWLRWEQRYER
RIQKRRKRIDNLREETYLRTVQELRSHYAFFGFEDESGQGLRRKQADDQMARRKRANRDLATRFEFVSLCERFGAEVVTVPARN
TTRECPSCGHVGENGPELVTVCQACGTARDKDFGAAMVILKRMQQALANRDAAA (SEQ ID NO: 519)
>3300002220|MLSBCLC_10211263_4|M
[wastewater-industrial wastewater-hydrocarbon resource environments]
MRVGRIVARLLRRSKRRARASIGTWTPDPRPALLVSLKARLDELREQRNADPRWREACRWADTPADDAPVRGEARRKASETDED
FAKRCEKRRDRLTRREAYRHALYEQRRCYWGTYNALCKCVDQARVSVIKARKAGLPAEWRRPRFPQSPQSIWADKGFRIVERGK
LWWTLEMPLGVKPIQWVRFRAKCGNWHAIPEDAHLRMVQLRRERDGHRWRYSVSIVIAGIPERRHNGSGVVGLDWGHREHGHGL
EREGIRAFTWIGDDGASGEILIPRECRDQLDRIDELKARADDAFNARGLPDRNRYSYRRRLMGLGVRTHEESLWLQWEMRYERR
MASARKRWQALRQGVYLSAVRQLRQRYAVFAFEDETGRGHRKLDTEEQTRHRKRSNRDLTARYEFLQICERSGARVITVPARNS
TRECPEPECGGLLPENGPELLVACPKCGRVRDKDYGAARVILRRALEALATEAQSA (SEQ ID NO: 520)
>3300002220|MLSBCLC_10211263_3|P
[wastewater-industrial wastewater-hydrocarbon resource environments]
MVTLALKRPAIVDATEALDAEYRSARWLHHRLLDFEDEHQRLLDCVANECAPGVVRVGRIVARLLRRSKRRARASIGTWTPDPR
PALLVSLKARLDELREQRNADPRWREACRWADTPADDAPVRGEARRKASETDEDFAKRCEKRRDRLTRREAYRHALYEQRRCYW
GTYNALCKCVDQARVSVIKARKAGLPAEWRRPRFPQSPQSIWADKGFRIVERGKLWWTLEMPLGVKPIQWVRFRAKCGNWHAIP
EDAHLRMVQLRRERDGHRWRYSVSIVIAGIPERRHNGSGVVGLDWGHREHGHGLEREGIRAFTWIGDDGASGEILIPRECRDQL
DRIDELKARADDAFNARGLPDRNRYSYRRRLMGLGVRTHEESLWLQWEMRYERRMASARKRWQALRQGVYLSAVRQLRQRYAVF
AFEDETGRGHRKLDTEEQTRHRKRSNRDLTARYEFLQICERSGARVITVPARNSTRECPEPECGGLLPENGPELLVACPKCGRV
RDKDYGAARVILRRALEALATEAQSA (SEQ ID NO: 521)

TABLE 246
Nucleotide Sequences of Representative CLUST.195009 Direct Repeats and Spacer
Lengths

| | | Spacer |
|---|---|---|
| CLUST.195009 Effector Protein Accession | Direct Repeat Nucleotide Sequence | Length(s) |
| SRR6201554_1444827_42\|M (SEQ ID NO: 501) | CCAGCAACAGCCGCGTGGGGCTACTAGTACTGCGAC (SEQ | 24-39 |
| | ID NO: 522) | |
| | GTCGCAGTACTAGTAGCCCCACGCGGCTGTTGCTGG (SEQ | |
| | ID NO: 539) | |
| OFV81970.1 (SEQ ID NO: 502) | CCACCAACAGCCGCGCAGGGCTTCGAATACTGCGAC (SEQ | 33-54 |
| | ID NO: 523) | |
| | GTCGCAGTATTCGAAGCCCTGCGCGGCTGTTGGTGG (SEQ | |
| | ID NO: 540) | |
| 3300009448\|Ga0114940_10001413_14\|P | CCAACAACAGCCGCGCAGGGCTTCGAGTACTGCGAC (SEQ | 37-38 |
| (SEQ ID NO: 503 ) | ID NO: 524) | |
| | GTCGCAGTACTCGAAGCCCTGCGCGGCTGTTGTTGG (SEQ | |
| | ID NO: 541) | |
| 3300001245\|JGI12048J13642_11056368_2\|M | CCAGCAACAGCCGCGTGGGGCTACTAGTACTGCGAC (SEQ | 23-39 |
| (SEQ ID NO: 504) | ID NO: 522) | |
| | GTCGCAGTACTAGTAGCCCCACGCGGCTGTTGCTGG (SEQ | |
| | ID NO: 539) | |
| 3300001245\|JGI12048J13642_11056369_15\|M | CCAGCAACAGCCGCGTGGGGCTACTAGTACTGCGAC (SEQ | 24-39 |
| (SEQ ID NO: 505) | ID NO: 522) | |
| | GTCGCAGTACTAGTAGCCCCACGCGGCTGTTGCTGG (SEQ | |
| | ID NO: 539) | |
| 3300027881\|Ga0255055_10005864_11\|P | CTCCCACCAGCCGCGCAGGGCTACGAGTACTGCGAC (SEQ | 35-37 |
| (SEQ ID NO: 506) | ID NO: 525) | |
| | GTCGCAGTACTCGAAGCCCTGCGCGGCTGTTGTTGG (SEQ | |
| | ID NO: 542) | |
| 3300001256\|JGI12210J13797_10707440_22\|P | CCAGCAACAGCCGCGTGGGGCTTCAAATACTGCGAC (SEQ | 37-39 |
| (SEQ ID NO: 507) | ID NO: 526) | |
| | GTCGCAGTATTTGAAGCCCCACGCGGCTGTTGCTGG (SEQ | |
| | ID NO: 543) | |
| 3300001256\|JGI12210J13797_10707440_21\|M | CCAGCAACAGCCGCGTGGGGCTTCAAATACTGCGAC (SEQ | 37-39 |
| (SEQ ID NO: 508) | ID NO: 526) | |
| | GTCGCAGTATTTGAAGCCCCACGCGGCTGTTGCTGG (SEQ | |
| | ID NO: 543) | |
| 3300001256\|JGI12210J13797_10707441_3\|P | CCAGCAACAGCCGCGTGGGGCTTCAAATACTGCGAC (SEQ | 37-39 |
| (SEQ ID NO: 509) | ID NO: 526) | |
| | GTCGCAGTATTTGAAGCCCCACGCGGCTGTTGCTGG (SEQ | |
| | ID NO: 543) | |
| 3300001256\|JGI12210J13797_10707441_2\|M | CCAGCAACAGCCGCGTGGGGCTTCAAATACTGCGAC (SEQ | 37-39 |
| (SEQ ID NO: 510) | ID NO: 526) | |
| | GTCGCAGTATTTGAAGCCCCACGCGGCTGTTGCTGG (SEQ | |
| | ID NO: 543) | |
| 3300001256\|JGI12210J13797_11264632_33\|M | CCAGCAACAGCCGCGTGGGGCTACTAGTACTGCGAC (SEQ | 23-39 |
| (SEQ ID NO: 511) | ID NO: 522) | |
| | GTCGCAGTACTAGTAGCCCCACGCGGCTGTTGCTGG (SEQ | |
| | ID NO: 539) | |
| 3300001256\|JGI12210J13797_11264634_48\|M | CCAGCAACAGCCGCGTGGGGCTACTAGTACTGCGAC (SEQ | 24-39 |
| (SEQ ID NO: 512) | ID NO: 522) | |
| | GTCGCAGTACTAGTAGCCCCACGCGGCTGTTGCTGG (SEQ | |
| | ID NO: 539) | |
| 3300001357\|JGI11876J14442_10000221_42\|P | CCAGCAACAGCCGCGTGGGGCTACTAGTACTGCGAC (SEQ | 24-39 |
| (SEQ ID NO: 513) | ID NO: 522) | |
| | GTCGCAGTACTAGTAGCCCCACGCGGCTGTTGCTGG (SEQ | |
| | ID NO: 539) | |
| SRR6201554_128554_71P (SEQ ID NO: 514) | CCAGCAACAGCCGCGTGGGGCTGCAAATACTGCGAC (SEQ | 37-39 |
| | ID NO: 527) | |
| | GTCGCAGTATTTGCAGCCCCACGCGGCTGTTGCTGG (SEQ | |
| | ID NO: 544) | |
| SRR6201554_128554_6\|M (SEQIDNO: 515) | CCAGCAACAGCCGCGTGGGGCTGCAAATACTGCGAC (SEQ | 37-39 |
| | ID NO: 527) | |
| | GTCGCAGTATTTGCAGCCCCACGCGGCTGTTGCTGG (SEQ | |
| | ID NO: 544) | |
| 3300014204\|Ga0172381_10020148_1\|P | CTCGCACACCAGCCGCTCAGGGCTTCGTACTGAGAC (SEQ | 35-38 |
| (SEQ ID NO: 516) | ID NO: 528) | |
| | GTCTCAGTACGAAGCCCTGAGCGGCTGGTGTGCGAG (SEQ | |
| | ID NO: 545) | |
| 3300028603\|Ga0265293_10119881_1\|M | CCAACAACAGCCGCGCGGGGCTGCGAATACTGCGAC (SEQ | 36-37 |
| (SEQ ID NO: 517) | ID NO: 529) | |
| | GTCGCAGTATTCGCAGCCCCGCGCGGCTGTTGTTGG (SEQ | |
| | ID NO: 546) | |
| 3300009095\|Ga0079224_100009227_18\|M | CTTCCAACAGCCGTGCAGGGCTTCGAATGCTGCA (SEQ | 37-44 |
| (SEQ ID NO: 518) | ID NO: 530) | |
| | TGCAGCATTCGAAGCCCTGCACGGCTGTTGGAAG (SEQ | |
| | ID NO: 547) | |
| 3300009095\|Ga0079224_100214048_3\|P | CCACCAACAGCCGCCGAGGGCTTCAAATTCTCGGACG | 35 |
| (SEQ ID NO: 519) | (SEQ ID NO: 531) | |
| | CGTCCGAGAATTTGAAGCCCTCGGCGGCTGTTGGTGG | |
| | (SEQ ID NO: 548) | |
| 33000022201\|MLSBCLC_10211263_4\|M | GATCACAACAGCCGCGAGAGGCTTCGAATATCTCGAC | 35-37 |
| (SEQ ID NO: 520) | (SEQ ID NO: 532) | |
| | GTCGAGATATTCGAAGCCTCTCGCGGCTGTTGTGATC | |
| | (SEQ ID NO: 549) | |
| 33000022201\|MLSBCLC_10211263_3\|P | GATCACAACAGCCGCGAGAGGCTTCGAATATCTCGAC | 35-37 |
| (SEQ ID NO: 521) | (SEQ ID NO: 532) | |
| | GTCGAGATATTCGAAGCCTCTCGCGGCTGTTGTGATC | |
| | (SEQ ID NO: 549) | |

TABLE 257
Non-coding Sequences of Representative CLUST.195009 Systems

>SRR6201554_1444827_42|M
GCCGACATCGCCGACACGGCCTACCTCATGCTGAGGCCTTTGACGGGCAAGCGCGCCCGCACGATCGACGAGGAGAACGCGCAG
CCGGGCCGCATGGACCCCCGCAACATCGGCAACGTCGTCGCCGAGGGGCAGAGCAAGAACCTATGAGCTGCTGCTGCTCCGATG
AGATCTGCCCGGTCTGGGAGGAAACCACCCCCCGGGCCCGAAGAGCCTACACGTGCTGCGAGTGCAGCGGCCCCATTCGCGTGG
GGGAACGTCACCACAAGATCTCTTCCCTTTTCGATGGGTCGTGGAGCACATCGCGTTCGCACGAGCGCTGTCATGCCATCAGCA
GCCTGCTGCAGGCGGACTGCGACGTGTACTGCGTAGGGATGCTTCGTGAGTGCCTCCATGCGCAGTCGGCCGGGCACCTTCCGG
AGGACCTTCGGCCTTACGCCAAGGGGCTCATGTTCAAGTTCTCGGAGCACTACTACGAGCACCAAGCGCGACTGCTGTCGAAAC
GTCGCTACGGGGCCCAGGCCGTATCCTCAAGGTCGGTTTCATGAGGCAGACTCTGACGCTGTGCCGGCCAGCCAGGTTGATCTC
CAGCGAAGTGCGGCTGGACCAGGAGTACCGGGCAGCCCGCTGGGCTCACCACCGCCTGCTGGACTTCGAGGACGAGCACCAGCG
ACACCTCAATCAGGTGGCAGAATGCCCATCGTGTGGTCACCTTGGTGATAATACGTCGGAATTGGTGACGGTGTGTCCGGCTTG
CGGCACCGCCAGGGACAAGGACGTTGGCGCGGCCGAGGTGATCCTTCGGCGCGCAGAGGAGGCGCTCGCAAAGCATTCTGCAGA
GTAGCGAAATCAAAGGGGTCGCGAGGCGTCCCCTCAAGGGACACCGCACCAACAGCCGCGTGGGGCTTCCAATACCTCGACAGT
CGCCCCACCGCTCGACGTGCGAACCCCACCGCTTCTGCGACTCGCCCCCTCACCCTAGCCCTTCACGCTGCCCCTCTCATGCTG
CCAACAAGCTCTTCGAAGCTCTGTCGCTCCAGCGCCTCCTCGTCAGGCCGGTCGCGGTCGTCGACCACGGCGTCGATGATACGT
TGTTTGGCGGCCAACACGCGCCCGATGTGCTCGTCGATGGTGTC (SEQ ID NO: 533)
>3300028603|Ga0265293_10119881_1|M
GAGTGAAGACACTATCCAGACCAGCGGTCGTAGACCGCGATACAGCGACCAGGCTCGACCGTGAGTACACGGCGGCACGATGGC
TGCACAACCGCATCCTCGACTTCGAGGCGGAGCACCAGCGGGTGATCGATGCCGCGGCAGACACCGCTGAGAGGACTAGCGATC
TAACCATAGCGTGCGTATCATGTGGACGTGTACGCGACCGTGATGCGGGGGCTGCCCGCGTCATCCTACGGCGCGGAATCGAGG
CGCTCGCAAACCGTGCCGCAAAGGCGCGGAACAGCGAGGCAGCAGAGTGAACAAA (SEQ ID NO: 534)

### Example 12—Functional Validation of an Engineered CLUST.195009 CRISPR-Cas System

[0450] Having identified components of CLUST.195009 CRISPR-Cas systems, a locus from the metagenomic source designated SRR6201554 (SEQ ID NO: 501) was selected for functional validation.

### DNA Synthesis and Effector Library Cloning

[0451] To test the activity of the exemplary CLUST.195009 CRISPR-Cas systems, systems were designed and synthesized using a pET28a(+) vector. Briefly, an E. coli codon-optimized nucleic acid sequence encoding the CLUST.195009 SRR6201554 effector (SEQ ID NO: 501 shown in TABLE 23) was synthesized (Genscript) and cloned into a custom expression system derived from pET-28a(+) (EMD-Millipore). The vector included the nucleic acid encoding the CLUST.195009 effector under the control of a lac promoter and an E. coli ribosome binding sequence. The vector also included an acceptor site for a CRISPR array library driven by a J23119 promoter following the open reading frame for the CLUST.195009 effector. The non-coding sequence used for the CLUST.195009 SRR6201554 effector (SEQ ID NO: 501) is set forth in SEQ ID NO: 533, as shown in TABLE 25. An additional condition was tested, wherein the CLUST.195009 SRR6201554 effector (SEQ ID NO: 501) was individually cloned into pET28a(+) without the non-coding sequence. See FIG. 1A.

[0452] An oligonucleotide library synthesis (OLS) pool containing “repeat-spacer-repeat” sequences was computationally designed, where “repeat” represents the consensus direct repeat sequence found in the CRISPR array associated with the effector, and “spacer” represents sequences tiling the pACYC184 plasmid or E. coli essential genes. In particular, the repeat sequence used for the CLUST.195009 SRR6201554 effector (SEQ ID NO: 501) is set forth in SEQ ID NO: 522, as shown in TABLE 24. The spacer length was determined by the mode of the spacer lengths found in the endogenous CRISPR array. The repeat-spacer-repeat sequence was appended with restriction sites enabling the bi-directional cloning of the fragment into the aforementioned CRISPR array library acceptor site, as well as unique PCR priming sites to enable specific amplification of a specific repeat-spacer-repeat library from a larger pool.

[0453] Next, the repeat-spacer-repeat library was cloned into the plasmid using the Golden Gate assembly method. Briefly, each repeat-spacer-repeat was first amplified from the OLS pool (Agilent Genomics) using unique PCR primers and pre-linearized the plasmid backbone using BsaI to reduce potential background. Both DNA fragments were purified with Ampure XP (Beckman Coulter) prior to addition to Golden Gate Assembly Master Mix (New England Biolabs) and incubated per the manufacturer's instructions. The Golden Gate reaction was further purified and concentrated to enable maximum transformation efficiency in the subsequent steps of the bacterial screen.

[0454] The plasmid library containing the distinct repeat-spacer-repeat elements and CRISPR effectors was electroporated into E. Cloni electrocompetent E. coli (Lucigen) using a Gene Pulser Xcell® (Bio-rad) following the protocol recommended by Lucigen. The library was either co-transformed with purified pACYC184 plasmid or directly transformed into pACYC184-containing E. Cloni electrocompetent E. coli (Lucigen), plated onto agar containing chloramphenicol (Fisher), tetracycline (Alfa Aesar), and kanamycin (Alfa Aesar) in BioAssay® dishes (Thermo Fisher), and incubated for 10-12 hours at 37° C. After estimation of approximate colony count to ensure sufficient library representation on the bacterial plate, the bacteria were harvested, and plasmid DNA WAS extracted using a QIAprep Spin Miniprep® Kit (Qiagen) to create an “output library.” By performing a PCR using custom primers containing barcodes and sites compatible with Illumina sequencing chemistry, a barcoded next generation sequencing library was generated from both the pre-transformation “input library” and the post-harvest “output library,” which were then pooled and loaded onto a Nextseq 550 (Illumina) to evaluate the effectors. At least two independent biological replicates were performed for each screen to ensure consistency. See FIG. 1B.

### Bacterial Screen Sequencing Analysis

[0455] Next generation sequencing data for screen input and output libraries were demultiplexed using Illumina bcl2fastq. Reads in resulting fastq files for each sample contained the CRISPR array elements for the screening plasmid library. The direct repeat sequence of the CRISPR array was used to determine the array orientation, and the spacer sequence was mapped to the source (pACYC184 or E. Cloni) or negative control sequence (GFP) to determine the corresponding target. For each sample, the total number of reads for each unique array element (rₐ) in a given plasmid library was counted and normalized as follows: (rₐ+1)/total reads for all library array elements. The depletion score was calculated by dividing normalized output reads for a given array element by normalized input reads.

[0456] To identify specific parameters resulting in enzymatic activity and bacterial cell death, next generation sequencing (NGS) was used to quantify and compare the representation of individual CRISPR arrays (i.e., repeat-spacer-repeat) in the PCR product of the input and output plasmid libraries. The array depletion ratio was defined as the normalized output read count divided by the normalized input read count. An array was considered to be “strongly depleted” if the depletion ratio was less than 0.3 (more than 3-fold depletion), depicted by the blue dashed line in FIG. 35 and FIG. 38. When calculating the array depletion ratio across biological replicates, the maximum depletion ratio value for a given CRISPR array was taken across all experiments (i.e. a strongly depleted array must be strongly depleted in all biological replicates). A matrix including array depletion ratios and the following features were generated for each spacer target: target strand, transcript targeting, ORI targeting, target sequence motifs, flanking sequence motifs, and target secondary structure. The degree to which different features in this matrix explained target depletion for CLUST.195009 systems was investigated.

[0457] FIG. 35 shows the degree of interference activity of the engineered composition, with a non-coding sequence, by plotting for a given target the normalized ratio of sequencing reads in the screen output versus the screen input. The results are plotted for each DR transcriptional orientation. In the functional screen for the composition, an active effector complexed with an active RNA guide will interfere with the ability of the pACYC184 to confer E. coli resistance to chloramphenicol and tetracycline, resulting in cell death and depletion of the spacer element within the pool. Comparison of the results of deep sequencing the initial DNA library (screen input) versus the surviving transformed E. coli (screen output) suggests specific target sequences and DR transcriptional orientations that enable an active, programmable CRISPR system. The screen also indicates that the effector complex is only active with one orientation of the DR. As such, the screen indicated that the CLUST.195009 SRR6201554 effector was active in the “forward” orientation (5′-CCAG . . . CGAC-[spacer]-3′) of the DR (FIG. 35).

[0458] FIG. 36A and FIG. 36B depict the location of strongly depleted targets for the CLUST.195009 SRR6201554 effector (plus non-coding sequence) targeting pACYC184 and E. coli E. Cloni essential genes, respectively. Flanking sequences of depleted targets were analyzed to determine the PAM for CLUST.195009 effectors. A WebLogo representation (Crooks et al., Genome Research 14: 1188-90, 2004) of the PAM sequence for CLUST.195009 SRR6201554 is shown in FIG. 37, where the “20” position corresponds to the nucleotide adjacent to the 5′ end of the target.

[0459] Furthermore, FIG. 38 shows that the CLUST.195009 SRR6201554 effector retains activity in the absence of the non-coding sequence. In agreement with FIG. 35, the CLUST.195009 SRR6201554 effector, without the non-coding sequence, was active in the “forward” orientation (5′-CCAG . . . CGAC-[spacer]-3′) of the DR. FIG. 39A and FIG. 39B depict the locations of the strongly depleted targets for the CLUST.195009 SRR6201554 effector, without the non-coding sequence, targeting pACYC184 and E. coli E. Cloni essential genes, respectively. A WebLogo of the PAM sequence for CLUST.195009 SRR6201554, without the non-coding sequence, is shown in FIG. 40, where the “20” position corresponds to the nucleotide adjacent to the 5′ end of the target.

[0460] These results suggest that effectors of CLUST.195009 do not require a tracrRNA. CLUST.195009 effectors may thus be self-processing, allowing for ease in multiplexing.

### Example 13—Identification of Components of CLUST.057059 CRISPR-Cas Systems

[0461] This protein family was identified using the computational methods described above. The CLUST.057059 system comprises single effectors associated with CRISPR systems found in particular environments, including freshwater, aquatic, biofilm, crustacean, microbial mat, sediment and soil crust environments as well as in Aphanizomenon phage, Cyanothece sp., Propionimicrobium lymphophilum, Sphaerospermopsis reniformis (TABLE 28). Exemplary CLUST.057059 effectors include those shown in TABLES 28 and 29, below. Examples of direct repeat sequences and spacer lengths for these systems are shown in TABLE 30. Optionally, the system includes a tracrRNA that is contained within a non-coding sequence listed in TABLE 31.

TABLE 288
Representative CLUST.057059 Effector Proteins

| | | | effector | SEQ |
|---|---|---|---|---|
| source | effector accession | # spacers | size | ID NO |
| aquatic-freshwater | 3300023179\|Ga0214923_10000634_60\|P | 10 | 623 | 601 |
| Aphanizomenon phage | ATW59329.1 | 10 | 466 | 602 |
| vB_AphaS-CL131 (MG209611) | | | | |
| aquatic metagenome | SRR3727507_43825_27\|P | 22 | 505 | 603 |
| aquatic metagenome | SRR3727511_164637_6\|M | 3 | 505 | 604 |
| aquatic metagenome | SRR3727516_4364_11\|P | 11 | 505 | 605 |
| aquatic metagenome | SRR3727519_259012_1\|M | 5 | 505 | 606 |
| aquatic metagenome | SRR3727519_13189_1\|M | 11 | 505 | 607 |
| aquatic metagenome | SRR5216639_261560_2\|P | 10 | 560 | 608 |
| aquatic metagenome | SRR5216639_2064603_3\|P | 3 | 522 | 609 |
| aquatic metagenome | SRR5216639_2018995_2\|M | 13 | 553 | 610 |
| aquatic metagenome | SRR5216639_409921_41\|M | 9 | 633 | 611 |
| aquatic metagenome | SRR5216639_409921_40\|P | 9 | 622 | 612 |
| aquatic metagenome | SRR8571171_1127661_43\|P | 9 | 622 | 613 |
| aquatic-freshwater | 3300002370\|release\|scaffold29556_3\|P | 3 | 557 | 614 |
| aquatic-freshwater | 3300002382\|1017448\|scaffold9922858_2\|M | 8 | 506 | 615 |
| aquatic-freshwater | 3300002396\|B570J29629_1000007_3\|P | 3 | 557 | 616 |
| aquatic-freshwater | 3300002396\|B570J29629_1000558_1\|M | 9 | 506 | 617 |
| aquatic-freshwater | 3300002408\|1017274\|scaffold00152_5\|M | 8 | 557 | 618 |
| aquatic-freshwater | 3300013005\|Ga0164292_10021448_2\|P | 15 | 391 | 619 |
| aquatic-freshwater-freshwater | 3300027808\|Ga0209354_10002575_5\|M | 11 | 559 | 620 |
| lake | | | | |
| aquatic-freshwater-freshwater | 3300020048\|Ga0207193_1000230_60\|P | 10 | 557 | 621 |
| lake sediment | | | | |
| aquatic-freshwater-freshwater | 3300015360\|Ga0163144_10269315_2\|M | 4 | 504 | 622 |
| microbial mat | | | | |
| aquatic-freshwater-glacier | 3300022561\|Ga0212090_10036221_2\|M | 6 | 585 | 623 |
| valley | | | | |
| aquatic-freshwater-lake | 3300005805\|Ga0079957_1000538_44\|M | 6 | 507 | 624 |
| aquatic-freshwater-lake | 3300005805\|Ga0079957_1019747_2\|M | 19 | 624 | 625 |
| aquatic-marine | 3300001043\|JGI12316J14372_10004500_6\|M | 4 | 484 | 626 |
| aquatic-marine | 3300001043\|JGI12316J15309_10000277_14\|M | 2 | 484 | 627 |
| aquatic-marine | 3300001341\|1010336\|scaffold_14_1570\|P | 2 | 484 | 628 |
| aquatic-marine | 3300027607\|Ga0207422_1002635_7\|P | 2 | 484 | 629 |
| aquatic-marine-aqueous | 3300007960\|Ga0099850_1030516_1\|P | 2 | 574 | 630 |
| aquatic-thermal springs- | 3300028735\|Ga0272446_1017865_2\|M | 3 | 454 | 631 |
| microbial mat | | | | |
| biofilm metagenome | SRR6869054_1535443_5\|P | 2 | 484 | 632 |
| biofilm metagenome | SRR6869054_457352_2\|P | 7 | 614 | 633 |
| biofilm metagenome | SRR6869055_1317318_5\|P | 2 | 484 | 634 |
| crustacean metagenome | SRR3137750_862387_23\|M | 6 | 553 | 635 |
| crustacean metagenome | SRR3138838_558748_1\|P | 2 | 547 | 636 |
| crustacean metagenome | SRR3139299_296800_1\|M | 2 | 557 | 637 |
| crustacean metagenome | SRR3139690_493772_1\|M | 2 | 550 | 638 |
| (SRR3139690) | | | | |
| crustacean metagenome | SRR3139690_185157_1\|M | 3 | 500 | 639 |
| (SRR3139690) | | | | |
| crustacean metagenome | SRR3139690_493772_1\|P | 2 | 618 | 640 |
| (SRR3139690) | | | | |
| Cyanothece sp. PCC 8801 | WP_015957291.1 | 38 | 494 | 641 |
| (CP001287) | | | | |
| Cyanothece sp. PCC 8801 | CP001287_4134\|P | 38 | 505 | 642 |
| (CP001287) | | | | |
| Cyanothece sp. PCC 8802 | WP_015785111.1 | 11 | 494 | 643 |
| (NC_013161) | | | | |
| Cyanothece sp. PCC 8802 | NC_013161_4122\|P | 11 | 505 | 644 |
| (NC_013161) | | | | |
| freshwater bacterium LH6-2 | OVJI010000022_17\|P | 4 | 649 | 645 |
| Bacteria. (OVJI010000022) | | | | |
| freshwater metagenome | CAAAFE010002307_2\|M | 5 | 515 | 646 |
| (CAAAFE010002307) | | | | |
| freshwater metagenome | OGWG01000020_5\|P | 19 | 660 | 647 |
| (OGWG01000020) | | | | |
| freshwater metagenome | OGWG01000020_4\|M | 19 | 657 | 648 |
| (OGWG01000020) | | | | |
| freshwater metagenome | OGWL01001214_2\|P | 9 | 556 | 649 |
| (OGWL01001214) | | | | |
| freshwater metagenome | OGWO01000325_8\|P | 13 | 560 | 650 |
| (OGWO01000325) | | | | |
| freshwater metagenome | OGWP01000327_5\|M | 7 | 657 | 651 |
| (OGWP01000327) | | | | |
| freshwater metagenome | OGWP01001429_1\|P | 4 | 572 | 652 |
| (OGWP01001429) | | | | |
| freshwater metagenome | OGWP01001429_1\|M | 4 | 581 | 653 |
| (OGWP01001429) | | | | |
| freshwater metagenome | SRR3989431_2283179_3\|M | 11 | 557 | 654 |
| (SRR3989431) | | | | |
| freshwater metagenome | SRR3989431_168870_5\|M | 10 | 558 | 655 |
| (SRR3989431) | | | | |
| freshwater metagenome | SRR4754862_508403_7\|P | 18 | 557 | 656 |
| (SRR4754862) | | | | |
| freshwater metagenome | SRR5468113_274154_3\|M | 2 | 574 | 657 |
| (SRR5468113) | | | | |
| freshwater metagenome | SRR5468149_1084624_1\|P | 3 | 613 | 658 |
| (SRR5468149) | | | | |
| freshwater metagenome | SRR5574091_1575611_4\|M | 13 | 548 | 659 |
| (SRR5574091) | | | | |
| freshwater metagenome | SRR6475630_1852385_2\|M | 2 | 557 | 660 |
| (SRR6475630) | | | | |
| freshwater metagenome | SRR6475633_3251865_1\|M | 12 | 471 | 661 |
| (SRR6475633) | | | | |
| fungi-freshwater | 3300031784\|Ga0315899_10084352_2\|M | 2 | 525 | 662 |
| (3300031784\|Ga0315899_10084352) | | | | |
| fungi-freshwater | 3300031857\|Ga0315909_10035026_2\|M | 5 | 548 | 663 |
| (3300031857\|Ga0315909_10035026) | | | | |
| fungi-freshwater | 3300032092\|Ga0315905_10155087_1\|P | 5 | 550 | 664 |
| (3300032092\|Ga0315905_10155087) | | | | |
| fungi-freshwater | 3300032092\|Ga0315905_10155087_2\|M | 5 | 559 | 665 |
| (3300032092\|Ga0315905_10155087) | | | | |
| lake water metagenome | SRR6476078_1283286_3\|P | 15 | 391 | 666 |
| (SRR6476078) | | | | |
| lake water metagenome | SRR6476078_1283286_3\|M | 15 | 385 | 667 |
| (SRR6476078) | | | | |
| lake water metagenome | SRR7812565_865334_1\|P | 3 | 623 | 668 |
| (SRR7812565) | | | | |
| microbial mat metagenome | SRR6448207_482583_3\|P | 7 | 613 | 669 |
| (SRR6448207) | | | | |
| microbial mat metagenome | SRR7244345_343276_44\|P | 39 | 522 | 670 |
| (SRR7244345) | | | | |
| Propionimicrobium | WP_016456110.1 | 15 | 532 | 671 |
| lymphophilum ACS-093-V- | | | | |
| SCH5 (AGZR01000008) | | | | |
| Propionimicrobium | AGZR01000008_18\|M | 15 | 513 | 672 |
| lymphophilum ACS-093-V- | | | | |
| SCH5 (AGZR01000008) | | | | |
| sediment metagenome | SRR8162779_1368970_53\|P | 5 | 522 | 673 |
| (SRR8162779) | | | | |
| soil crust metagenome | SRR5855413_300079_4\|M | 3 | 524 | 674 |
| (SRR5855413) | | | | |
| soil crust metagenome | SRR5855413_1311040_12\|M | 12 | 516 | 675 |
| (SRR5855413) | | | | |
| soil crust metagenome | SRR5855415_346708_105\|P | 2 | 502 | 676 |
| (SRR5855415) | | | | |
| soil crust metagenome | SRR5855420_1331858_67\|P | 12 | 509 | 677 |
| (SRR5855420) | | | | |
| soil crust metagenome | SRR5855420_1331858_68\|M | 12 | 516 | 678 |
| (SRR5855420) | | | | |
| soil crust metagenome | SRR5855435_639752_6\|P | 3 | 524 | 679 |
| (SRR5855435) | | | | |
| soil metagenome | SRR6201738_878635_2\|M | 4 | 685 | 680 |
| (SRR6201738) | | | | |
| soil metagenome | SRR6201739_286584_1\|P | 3 | 685 | 681 |
| (SRR6201739) | | | | |
| Sphaerospermopsis reniformis | GCL37732.1 | 26 | 626 | 682 |
| (BJCE01000094) | | | | |

TABLE 299
Amino acid Sequences of Representative CLUST.057059 Effector Proteins

>3300023179|Ga0214923_10000634_60|P
[aquatic-freshwater]
MKTIKIKIKLTTDQVQLCDRYLEELTWLWNLTLSNQLHNHCVTWYDWAAKLSANLDKATEKLDKLKPEQQQLIKDYYRT
KDKPKLSKKEQELVAKFDIFARWNSFSLDGIIPVPLRLGNSGYEGLSCQIATGGNYWKRDENINIPINTKKGIVHVKGY
KLVKGDKPWQRIEIVPHKYRTFPGGKFEGRELTTLEKLDNVNGLNTLRAFQNLPDLQVSSHYIGGLLAFFKESWSAFLD
PKRMNSRKPKFKKDSDKITTLSNNQCAPNRIDVNKNIVTVTGFSPIAIIDKNWVKRLNLSEVLPRTYMLTQNPSGYYIN
IVIAHPLHEEKTALVKKLPKVKKEFGEDSQEYEDIKSKIKFLEQQIKEASIVKGKDLSVGIDPGVQAVVSTDHGALFLP
NLTRERVSIHIEELQSRLDNIELINDKKWKSLGNKTPRIKTKNETKLQEKISRLHERGANSSNAFNHKLSTRLSRTYEH
IAWEDTQINNLLKQVEPKALPEGIGYAHNGASAKRGLNWIMRQRCLSDLKAKTKQKTENRGGNFHEPPANYSSQTCHCC
KQKGERRSQHEFICKNSDCKLFDIPQQADTNAARNHKQNGGFELGEVKYHNVKLVYQKPKRFKKKRLTNQ
(SEQ ID NO: 601)
>ATW59329.1
[Aphanizomenon phage vB_AphaS-CL131]
MKTKTIEFKIYPTLAQSQTIDKWLQDIKWVWNKGLSLKFADRQKHYRTQIGDRNIPDGLPLRWKWRKVEATDKKGKITE
KWEKIRLVGGGVVRPKSGYPYCPIREHRNIEDPGKFKYFRNDNSPQFVIDIPSEFKEGMADTLKKAWQAYSDPKRPTQK
PKFKGKQDKVRSLTSLHAGGKSKLLKPERIPGSDNGFVQFPKLGKLKVKGLYSRHDWVEWGSAKIVKEPSGYYLHVCVD
VPNDPLPKSDKSVGIDPGLLSVITTDQGREVAPPKLFRKQQTKLRRLQRKASRQQKGGSNQKKTYQKVALQHEKIRRSR
NAFNHKLSTKVVREYSGIVMEDLKIQNLSRKPKAKKREDGNGYEQNGAKRKAGLNKSFADSALGDLISKIETKCKDTDR
EFVKVAAHHTTVDCSNCGAKIKKALSQRTHRCTECGYEDGRDSNAAKNILIKGQKEFKTVYRAWAWEHGET
(SEQ ID NO: 602)
>SRR3727507_43825_27|P
[aquatic metagenome]
MKTLEFKLTLNQSQRAKLNDWMSANKYVWNEGVRHIEWFNEFNRYHKPDKKSYPCSPIRSQNFWKKYRGQEPIENYGLG
EFPSCPIGWINDSFNPELPSFPVSRSPEHEQIHNISLFSFIKLFAHSRNQDKPWLLEVPSKFINGEVDCLINSWNAFVK
SPANLKRRPPKYKGKHDKIDALIHNNSKGMGTKGDSINVPKLGYVRVKGFSDRWYFEDGKPIDFCPLKICKKASGWYLL
ITGNTPDRHYQKSDSIAGFDLGVHEILTDEKNYHATSPRYLKNSQASLKRLQRKMSRQFRMNEGDKTWERKNWNRTKLK
LARTHERIARQRRALNHFLSHKVVNTHAVIALEDLKLLNMTKAVKTGEAGVQNGRKSKSGLNRAMLDNGLGQLVGMIET
KAKVADRIVVQVDPKHTSQECPHCGHIEKKANKKNREVTCGNCGASFHRDTSAAEIIKRRGIARLEGGNVESKAKKERK
AKYGKRSKVVESAIDPRTIFVEALQDLPLFG
(SEQ ID NO: 603)
>SRR3727511_164637_6|M
[aquatic metagenome]
MKTLEFKLTLNQSQRAKLNDWMSANKYVWNEGVRHIEWFNEFNRYHKPDKKSYPCSPIRSQNFWKKYRGQEPIENYGLG
EFPSCPIGWINDSFNPELPSFPVSRSPEHEQIHNISLFSFIKLFAHSRNQDKPWLLEVPSKFINGEVDCLINSWNAFVK
SPANLKRRPPKYKGKHDKIDALIHNNSKGMGTKGDSINVPKLGYVRVKGFSDRWYFEDGKPIDFCPLKICKKASGWYLL
ITGNTPDRHYQKSDSIAGFDLGVHEILTDEKNYHATSPRYLKNSQASLKRLQRKMSRQFRMNEGDKTWERKNWNRTKLK
LARTHERIARQRRALNHFLSHKVVNTHAVIALEDLKLLNMTKAVKTGEAGVQNGRKSKSGLNRAMLDNGLGQLVGMIET
KAKVADRIVVQVDPKHTSQECPHCGHIEKKANKKNREVTCGNCGASFHRDTSAAEIIKRRGIARLEGGNVESKAKKERK
AKYGKRSKVVESAIDPRTIFVEALQDLPLFG
(SEQ ID NO: 604)
>SRR3727516_4364_11|P
[aquatic metagenome]
MKTLEFKLTLNQSQRAKLNDWMSANKYVWNEGVRHIEWFNEFNRYHKPDKKSYPCSPIRSQNFWKKYRGQEPIENYGLG
EFPSCPIGWINDSFNPELPSFPVSRSPEHEQIHNISLFSFIKLFAHSRNQDKPWLLEVPSKFINGEVDCLINSWNAFVK
SPANLKRRPPKYKGKHDKIDALIHNNSKGMGTKGDSINVPKLGYVRVKGFSDRWYFEDGKPIDFCPLKICKKASGWYLL
ITGNIPDRHYQKSDSIAGFDLGVHEILTDEKNYHATSPRYLKNSQASLKRLQRKMSRQFRMNEGDKTWERKNWNRTKLK
LARTHERIARQRRALNHFLSHKVVNTHAVIALEDLKLLNMTKAVKTGEAGVQNGRKSKSGLNRAMLDNGLGQLVGMIET
KAKVADRIVVQVDPKHTSQECPHCGHIEKKANKKNREVTCGNCGASFHRDTSAAEIIKRRGIARLEGGNVESKAKKERK
AKYGKRSKVVESAIDPRTIFVEALQDLPLFG
(SEQ ID NO: 605)
>SRR3727519_259012_1|M
[aquatic metagenome]
MKTLEFKLTLNQSQRAKLNDWMSANKYVWNEGVRHIEWFNEFNRYHKPDKKSYPCSPIRSQNFWKKYRGQEPIENYGLG
EFPSCPIGWINDSFNPELPSFPVSRSPEHEQIHNISLFSFIKLFAHSRNQDKPWLLEVPSKFINGEVDCLINSWNAFVK
SPANLKRRPPKYKGKHDKIDALIHNNSKGMGTKGDSINVPKLGYVRVKGFSDRWYFEDGKPIDFCPLKICKKASGWYLL
ITGNTPDRHYQKSDSIAGFDLGVHEILTDEKNYHATSPRYLKNSQASLKRLQRKMSRQFRMNEGDKTWERKNWNRTKLK
LARTHERIARQRRALNHFLSHKVVNTHAVIALEDLKLLNMTKAVKTGEAGVQNGRKSKSGLNRAMLDNGLGQLVGMIET
KAKVADRIVVQVDPKHTSQECPHCGHIEKKANKKNREVTCGNCGASFHRDTSAAEIIKRRGIARLEGGNVESKAKKERK
AKYGKRSKVVESAIDPRTIFVEALQDLPLFG
(SEQ ID NO: 606)
>SRR3727519_13189_1|M
[aquatic metagenome]
MKTLEFKLTLNQSQRAKLNDWMSANKYVWNEGVRHIEWFNEFNRYHKPDKKSYPCSPIRSQNFWKKYRGQEPIENYGLG
EFPSCPIGWINDSFNPELPSFPVSRSPEHEQIHNISLFSFIKLFAHSRNQDKPWLLEVPSKFINGEVDCLINSWNAFVK
SPANLKRRPPKYKGKHDKIDALIHNNSKGMGTKGDSINVPKLGYVRVKGFSDRWYFEDGKPIDFCPLKICKKASGWYLL
ITGNTPDRHYQKSDSIAGFDLGVHEILTDEKNYHATSPRYLKNSQASLKRLQRKMSRQFRMNEGDKTWERKNWNRTKLK
LARTHERIARQRRALNHFLSHKVVNTHAVIALEDLKLLNMTKAVKTGEAGVQNGRKSKSGLNRAMLDNGLGQLVGMIET
KAKVADRIVVQVDPKHTSQECPHCGHIEKKANKKNREVTCGNCGASFHRDTSAAEIIKRRGIARLEGGNVESKAKKERK
AKYGKRSKVVESAIDPRTIFVEALQDLPLFG
(SEQ ID NO: 607)
>SRR5216639_261560_2|P
[aquatic metagenome]
MSNVSENVRTKEFKLILTPEQERTLEDWMLVCKWVWNRSLGLIEEFNDWNPYDKISKSYVPAMPLQRYDRKLKQFVRVE
IPDWKLSTERKETSKGLVHPVSIDKDTPQIDSLNSKKSILYGFLKVFGHQYHKDRIITYMVRGQERKVKFTDCPAKFIQ
GVSHELSKAWDGFLAGRHSRPRFKTARDKVMTLLHYNAKDIGVKGSSINIPKLGYVEVIGFDNRWYGVDFNPMKICKKA
SGWYVQFTATVPVKKFKKTGLACGIDPGHQFVMALDNGHTIKAAQPLKQNLRRLKRMQKRLSRKFRINNGKTKNWEKLN
QRIAKLHEKIARHRRSFNHWHSTNLVKWFDVIFVEDYKPANVYRKAKAKTKTDEQGNPMTADNGAVVYEKNNQKRKKGS
NRTGSDIAIGQAIELLETKAKEHDKLVIRVPAYGTTLRCANCGHEERKSLSQRIHHCANCGYTVARDVNSGQNVKLKGL
AQLALDHGVELVDNFWYQILKNATTSSCSEKKGKKKAKKKDVVSIPDDLFKNGVSAFLIAETVKTRAIIKQKYLENLNK
TAKTLMG
(SEQ ID NO: 608)
>SRR5216639_2064603_3|P
[aquatic metagenome]
MDPSIKVRKVEFKVPLDTQQRQIFEHHSQALRFIWNTGLACIQWREWWEKWQQVLESPEYQGYAPEPVEMDWGYNLIGK
KKVYGLCCDRVRFRIEKEDPVLDVGEWIDGTKLGSGKSIAGYWVAYPCKPDSVREHWTEQPRLPLLMKNPYMALRSMFA
KKNWDPDSVEGKIIHSLNTAWVAGELKALGDAWSSYKSGVRKRPRFKKRHDRSNLINPSSKQTKFCKNSLTLPGMGRVT
VKGLQKRWGNKPACPISLIKEGDEFYLQLSGGVEVPATRSNGVTIGIDPGSVRLATDDSGRAIDAPKFGKRAMRRAQKL
QAAINRKLRLNSDRVYDDADPSKFYLKPRRDWKRKNLQKVRTKLQRLSAKTARQRRAFNHFHSTRLVQSADVIIMEGIE
LKNVTRAVKKGKSGEHNKRKAKAGLNRSLLDNAIGQFYGMVEQKAKDAGKVTARVNPFRTSMTCHQCGFSDAKNRKTQA
VFHCQKCGHHDNADRNAAANIKRMGILGITKLTFDNEWNITVPDWDKI
(SEQ ID NO: 609)
>SRR5216639_2018995_2|M
[aquatic metagenome]
MNTITKTRKVEFKVTLDTQQRQVFDHHSHALRFVWNTGLACIQWREWWEKWQQVLESPDRVGYAPEPVEMEWAYNLVGK
KKVYGLACDRVRFRLEKSDPTLANGEWVANGKKEGGYWVAYPCKPQPVREHWTEEPRLMLLMKNPYMALRTMFAKKNWD
PDSVQGKIIHSLNTAWVAGELKALGDAWSSYKSGVRKRPRFKKRHDRSNLINPSSKQTKFSGNSLTLPGMGRVTVKGLQ
QRWGDKPACPIALIKEGDEFYLQLTGEVQVPAVRSNGVTIGLDPGSVRLATADNGSAIEAPKFGRNIMRRNKKLQASIN
RKLRLNSDRVHDEADPSKFYLKPRKNWKRKNLQKVRTKLQRLNTKAARQRRAYNHFHSTRIVQSADVIIMEGLELKNVT
RAVKKGKSGQHNKRKAKAGLNRSLLDNAIGQFYGMVEQKAKDAGKVTTRVNPFRTSMTCHQCGFSDAKNRTTQAVFHCQ
KCGHRDNADRNAALNIKRMGVLGVTKLTFDNDWNITIEGWGSVAALHSKGLKPVGTDKKRSKRVQKEHPSQMVLELGAP
(SEQ ID NO: 610)
>SRR5216639_409921_41|M
[aquatic metagenome]
MTRENKQAVNNMKTIKIKVKLTPSQIESCNKYLEELSWLWNLVLANQLHNHCIRWYEWAAKLSAELAKTNEKLEKLKPE
QQQLIKDYYNSTTKPKLSKKDQELVNKFNILSRWSPFDLEGIIPVPLRIGNSAYEGLSCQIATGGSYWKRDDNTVIPVN
TKKGIAFIKGSKLVKGDRPWQRIEIKPHEYRKFPGGKYEGRELVTLEKFDNLNGLNTLRASQNLPDLTVSSHYIGGLLG
FFKESWKAFLDSKRTISRKPKFKKDNDKIATLSNSQCPPNRIDVDKNIIAITGFSAVKVDDKSWVKRLNLSQSLPRTYM
LTKQQSGYYINIIVAHPLQEEKSILANKLPKVKKQFGEDSQEYADIKSKLKFIEQQIKESSVIEGKGLSVGIDPGIQSV
VSTDHGALFLPNLSRERISIHIEELQSKLDNAESINDKKWKEAGNKTPRPRTNAEIKLQDKIRRLHERGSNSSNAFNHK
LSTRLSRTYEHIAWENTQIKNLLKQVEPKSLPEGTGYAHNGASAKRGLNWIMRQRCLGDLEKKTKLKVENRGGSFQQPP
ANYTSQTCHQCKQKGERLSQHEFICKNSECRLFNVPQQADTNAARNHKQNAGFELGEVKYNSVRLTYEKPQRFKKKRAD
N
(SEQ ID NO: 611)
>SRR5216639_409921_40|P
[aquatic metagenome]
MKTIKIKVKLTPSQIESCNKYLEELSWLWNLVLANQLHNHCIRWYEWAAKLSAELAKTNEKLEKLKPEQQQLIKDYYNS
TTKPKLSKKDQELVNKFNILSRWSPFDLEGIIPVPLRIGNSAYEGLSCQIATGGSYWKRDDNTVIPVNTKKGIAFIKGS
KLVKGDRPWQRIEIKPHEYRKFPGGKYEGRELVTLEKFDNLNGLNTLRASQNLPDLTVSSHYIGGLLGFFKESWKAFLD
SKRTISRKPKFKKDNDKIATLSNSQCPPNRIDVDKNIIAITGFSAVKVDDKSWVKRLNLSQSLPRTYMLTKQQSGYYIN
IIVAHPLQEEKSILANKLPKVKKQFGEDSQEYADIKSKLKFIEQQIKESSVIEGKGLSVGIDPGIQSVVSTDHGALFLP
NLSRERISIHIEELQSKLDNAESINDKKWKEAGNKTPRPRTNAEIKLQDKIRRLHERGSNSSNAFNHKLSTRLSRTYEH
IAWENTQIKNLLKQVEPKSLPEGTGYAHNGASAKRGLNWIMRQRCLGDLEKKTKLKVENRGGSFQQPPANYTSQTCHQC
KQKGERLSQHEFICKNSECRLFNVPQQADTNAARNHKQNAGFELGEVKYNSVRLTYEKPQRFKKKRADN
(SEQ ID NO: 612)
>SRR8571171_1127661_43|P
[aquatic metagenome]
MKTIKIKVKLTPSQIESCDKYLEELSWLWNLVLANQLHNHCIRWYEWAAKLSAELAKTNEKLEKLKPEQQQLIRDYYNS
TTKPKLSKKDQELVNKFNILSRWSPFDLEGIIPVPLRIGNSAYEGLSCQIATGGSYWKRDDNTVIPVNTKKGISFIKGS
KLVKGDKPWQRVEIKPHEYRKFPGGKYEGRELVTLEKFDNLNGLNTLRASQNLPDLTVSSHYIGGLLGFFKESWKAFLD
SKRTISRKPKFKKDNDKIATLSNSQCPPNRIDVDKNIIAITGFSAVKVDDKSWVKRLNLSQSLPRTYMLTKQQSGYYIN
IIVAHPLQEEKSILANKLPKVKKQFGEDSQEYADIKSKLKFIEQQIKESSVIEGKGLSVGIDPGIQSVVSTDHGALFLP
NLSRERVSIHIEELQSKLDNAESINDKKWKEAGNKTSRPRTNTEIKLQDKIRRLHERGSNSSNAFNHKLSTRLSRTYEH
IAWENTQIKNLLKQVEPKSLPEGTGYAHNGASAKRGLNWIMRQRCLGDLEKKTKLKVENRGGSFQQPPANYTSQTCHQC
KQKGERLSQHEFICKNSECRLFNVPQQADTNAARNHKQNAGFELGEVKY
NGVRLTYEKPQRFKKKRADN
(SEQ ID NO: 613)
>3300002370|release|scaffold29556_3|P
[aquatic-freshwater]
MSNFSENVRTKEFKLILSSEQERTLEDWMLVCKWVWNRSLGLIEEFNEWNPYDKLSKSNVPATPLQRYDRKLKQWVRIE
IPDWKMGIERVEKKRGLIHPVAIDENSPIIDSLDSKKSVLYGFLKVFGHQHHKDRIVTYLVRGEERKVNFTDCPAKFIQ
GVAHELSKAWEGFLAGRHSRPRFKTAKDKVMTLIHYNAKDLGVKDSKVNIPKLGYIEVIGFDKRWYGCDFNPMKICKKA
SGWYIQLTASVPVKQAKKTGLCCGIDPGHQFVMALDNGHTIEAAQPLKRSLKRLRKMQQQLSRKYRMNEGKTKNWEKLN
NKIAKLHEKIARHRRSFNHWHSTNLINWFDVIFVEDYKPANVYRKAKAKAKLDTEGNPVVAENGTVIYDKNSQKRKRGS
NRTGSDVAIGQAIDLLETKAKEHGKLVIRVDNWGTTLCCAKCGHQEKKKLSQRTHKCSNCGYTVARDVNSGQNIKLKGL
AQMAINQGVELSDNFWYKFLINKNSATPSCSKKATKKKTKKSDTITIPDDLFKNGVHDFLVAETAKTHAIINRMSLGDF
DRNA
(SEQ ID NO: 614)
>3300002382|1017448|scaffold9922858_2|M
[aquatic-freshwater]
MGNSGYEGLSCQIATGGNYWKRDENINIPINTKKGIIHVKGYKLVKGDKLWQRIEIVPHKYRTFPGGKFEGRELTTLEK
LDNVNGLNTLRAFQNLPDLQVSSHYIGGLLAFFKESWSAFLDPKRMNSRKPKFKKDSDKITTLSNNQCAPNRIDVNKNI
VTVTGFSPITIIDKNWVKRLNLSQVLPRTYMLTQNPSGYYINIVIAHPLHEEKIALVKKLPKVKKEFGEDSQEYEDIKS
KIKFLEQQIKESSIVKGKDLSVGIDPGVQAVVSTDHGALFLPNLTRERVSIHIEELQSRLDNAELINDKKWKSLGNKTP
RIKTKNETKLQEKISRLHERGANSSNAFHKLSTRLSRTYEHIAWEDTQINNLLKQVEPKALPEGVGYAHNGASAKRGNL
NWIMRQRCLSDLKAKTKQKTENRGGNFHEPPANYSSQTCHCCGQKGERRSQHEFVCKNSDCKLFDIPQQADTNAARNHK
QNGGFELGEVKYHNVKLVYQKPKRFKKKRLTK
(SEQ ID NO: 615)
>3300002396|B570J29629_1000007_3|P
[aquatic-freshwater]
MSNFSENVRTKEFKLILSSEQERTIEDWMLVCKWVWNRSLGLIEEFNEWNPYDKLSKSNVPATPLQRYDRKLKQWVRIE
IPDWKMGIERVEKKRGLIHPVAIDENSPIIDSLDSKKSVLYGFLKVFGHQHHKDRIVTYLVRGEERKVNFTDCPAKFIQ
GVAHELSKAWEGFLAGRHSRPRFKTAKDKVMTLIHYNAKDLGVKDSKVNIPKLGYIEVIGFDKRWYGCDFNPMKICKKA
SGWYIQLTASVPVKQAKKTGLCCGIDPGHQFVMALDNGHTIEAAQPLKRSLKRLRKMQQQLSRKYRMNEGKTKNWEKLN
NKIAKLHEKIARHRRSFNHWHSTNLINWFDVIFVEDYKPANVYRKAKAKAKLDTEGNPVVAENGTVIYDKNSQKRKRGS
NRTGSDVAIGQAIDLLETKAKEHGKLVIRVDNWGTTLCCAKCGHQEKKKLSQRTHKCSNCGYTVARDVNSGQNIKLKGL
AQMAINQGVELSDNFWYKFLINKNSATPSCSKKATKKKTKKSDTITIPDDLFKNGVHDFLVAETAKTHAIINRMSLGDF
DRNA
(SEQ ID NO: 616)
>33000023961B570J29629_1000558_1|M
[aquatic-freshwater]
MGNSGYEGLSCQIATGGNYWKRDENINIPINTKKGIIHVKGYKLVKGDKLWQRIEIVPHKYRTFPGGKFEGRELTTLEK
LDNVNGLNTLRAFQNLPDLQVSSHYIGGLLAFFKESWSAFLDPKRMNSRKPKFKKDSDKITTLSNNQCAPNRIDVNKNI
VTVTGFSPITIIDKNWVKRLNLSQVLPRTYMLTQNPSGYYINIVIAHPLHEEKIALVKKLPKVKKEFGEDSQEYEDIKS
KIKFLEQQIKESSIVKGKDLSVGIDPGVQAVVSTDHGALFLPNLTRERVSIHIEELQSRLDNAELINDKKWKSLGNKTP
RIKTKNETKLQEKISRLHERGANSSNAFNHKLSTRLSRTYEHIAWEDTQINNLLKQVEPKALPEGVGYAHNGASAKRGL
NWIMRQRCLSDLKAKTKQKTENRGGNFHEPPANYSSQTCHCCGQKGERRSQHEFVCKNSDCKLFDIPQQADTNAARNHK
QNGGFELGEVKYHNVKLVYQKPKRFKKKRLTK
(SEQ ID NO: 617)
>3300002408|1017274|scaffold00152_5|M
[aquatic-freshwater]
MSNFSENVRTKEFKLILSSEQERTLEDWMLVCKWVWNRSLGLIEEFNEWNPYDKLSKSNVPATPLQRYDRKLKQWVRIE
IPDWKMGIERVEKKRGLIHPVAIDENSPIIDSLDSKKSVLYGFLKVFGHQHHKDRIVTYLVRGEERKVNFTDCPAKFIQ
GVAHELSKAWEGFLAGRHSRPRFKTAKDKVMTLIHYNAKDLGVKDSKINIPKLGYIEVIGFDKRWYGCDFNPMKICKKA
SGWYIQLTASVPIKQAKKTGLCCGIDPGHQFVMALDNGHTIEAAQPLKRSLKRLRKMQQQLSRKYRMNEGKTKNWEKLN
NKIAKLHEKIARHRRSFNHWHSTNLINWFDVIFVEDYKPANVYRKAKAKAKLDTEGNPVVAENGTVIYDKNSQKRKRGS
NRTGSDVAIGQAIDLLETKAKEHGKLVIRVDNWGTTLCCAKCGHQEKKKLSQRTHKCSNCGYTVARDVNSGQNIKLKGL
AQMAINQGVELSDNFWYKFLINKNSATPSCSKKATKKKTKKSDTITIPDDLFKNGVHDF
LVAETAKTHAIINRMSLGDFDRNA
(SEQ ID NO: 618)
>3300013005|Ga0164292_10021448_2|P
[aquatic-freshwater]
MIFEPNVKVLEFKIHPTEEQVSKIDQSLAACKLLWNLSIALKEESKQRYYRKKHKFDEFSPEIWELSYSGHYDEKEFKS
LKDKEKKLLIGNPCCKIAYFKKTSNGKEYTPLDAIPIRRFMNAENIDKDAVNYLNRKKLAFYFRENTAKFIGEIETEFK
KGFFKSVIKPAYDAAKKGIRGIPRFKGRRDKVETLVNGQPGTIKIKSNGVIVSSKIGLLKVRGLDRLQGKAPRMAKITR
KATGYYLQLTVETDDTIYKESDKCVGLDMGAVAIFTDDLGRQSEAKRYAKIQKKRLDRLQRQASRQKDGSNNQRKTYAK
LARVHEKIARQRKGRNAQLAHKITSEYQSVILEDLKLKNMTAAAKPKEREDGDGYKQNGKKRKSGLNKALLEMSV
(SEQ ID NO: 619)
>3300027808|Ga0209354_10002575_5|M
[aquatic-freshwater-freshwater lake]
MIQANIEDKMTQENITRVIKFRLTLTEEQRLLIDEKMRLLKYLWNLAVSLQEEVNQRRLRDKFGFKEFSPEFWELSYLK
LYSGFSHIEKLPKDKLRLLTGNPCCKIAYLKNKKEYVSLKLEERKKRPYLGNPDAKKHTTKPPDKKDLKKYFYPDLADK
IFEIGSEFRGCFYRYVISKAFETAKKGIRGFPKYKGKLDSVESLIVGHPTLIKIRDGEIFLNKQIGLLVIDDINRLPKD
ADVRMASIVRKASGYYLHLTVNLPVPMHLPSDRQIGIDVGCVNLYTDSEGRHIETKAYYRNKERKIAHLQRKMARQEKG
SANYLKSKEKLALLHEQIKDRRAGYLHQVSHKLTQKYSHIAMEDLKLKNMTKRANVKENEDGTYAHNGASAKSGLNKSI
LDQGIGELKRQLLYKSQEKGGQVVLVNPKFTSQTCFECGHKHKDNRKSQSEFICVSCGHSANADENAAKNILTLSLISS
TIGVLRSSLFSYPSLLGKAVSLLAYVCGSPKGTCEAERERSDPPIDPPAKGGNCLDNFSTLTIKDPRHQLEKASQPIDS
VQLTLF
(SEQ ID NO: 620)
>3300020048|Ga0207193_1000230_60|P
[aquatic-freshwater-freshwater lake sediment]
MSNFSENVRTKEFKLILSSEQERTLEDWMLVCKWVWNRSLGLIEEFNEWNPYDKLSKSNVPATPLQRYDRKLKQWVRIE
IPDWKMGIERVEKKRGLIHPVAIDENSPIIDSLDSKKSVLYGFLKVFGHQHHKDRIVTYLVRGEERKVNFTDCPAKFIQ
GVAHELSKAWEGFLAGRHSRPRFKTAKDKVMTLIHYNAKDLGVKDSKINIPKLGYIEVIGFDKRWYGCDFNPMKICKKA
SGWYVQLTASVPVKQAKKTGLCCGIDPGHQFVMALDNGHTIEAAQPLKRSLKRLRKMQQQLSRKYRMNEGKTKNWEKLN
NKIAKLHEKIARHRRSFNHWHSTNLINWFDVIFVEDYKPANVYRKAKAKAKLDTEGNPVVAENGTVIYDKNNQKRKRGS
NRTGSDVAIGQAIDLLETKAKEHGKLVIRVDNWGTTLCCAKCGHQEKKKLSQRTHKCSNCGYTVARDVNSGQNIKLKGL
AQMAINQGVELSDNFWYKFLINKNSATPSSSKKATKKKTKKSDTITIPDDLFKNGVHDFLVAETAKTHAIINRMSLGDF
DRNA
(SEQ ID NO: 621)
>3300015360|Ga0163144_10269315_2|M
[aquatic-freshwater-freshwater microbial mat]
MKTAEFKLNLNNAQKAELNDWMSALKWVWNEGVRMIDYFNQFNAYHKPDKRSYPCSPILGVNHKRRYKKGFNGCTKSGD
RPMGIYPSCPIGWIADSFNPEEPAYAVSQKADSIQVKNLSFFSLQKLFTHSRNQDRPWLISVPSKFIDGETQSLVNSWE
AFKSGVANRKPPKYKGKRDKIESLIHNNSKGMGVKGDSINIPKIGYVRVKGFSDRWLFEDGKPIDFCPMKICKKASGWY
LQITGHLPDRKYKKTSSIAGFDVGVHEIVTDDIALSVKSPRWLKTNGAKLKKLQRKVSRQWRMNENNDAWERKNWQKTQ
NKIARLHEKIARQRRAFNHYLSHKIVNTHQVIALEDLKLLNMTKAVKTGEAGVANGRKAKSGLNRAMLDVGIGQLVSMI
ETKAKVAGRDVVFVDPKHTSQICPECGHVEKKKNRKNRNVKCSNCGAEFHRDRSAAIEIKKRAVTKMSIPKEVKKERKP
RGVGAFAAKKKAKDSRPIFDPSLIDLPLFG
(SEQ ID NO: 622)
>3300022561|Ga0212090_10036221_2|M
[aquatic-freshwater-glacier valley]
MLTLEFSVQLTEEQKTIAGEWMDSLKHQWNLGLSALEEFDRFSWYNKHDKKPALCCPIAEGEWIKEEKRVASTCSLIRD
PAPKLTSSALQTGGDSLGTMARSDRLPEFLQQVPSKFRMGMLALLSVSWDAYIKDRKNKGKPKYKRRRDRWDVLYSGNL
KDGLSCNGDILKGIPKLGTVVVPKLNQRWKTPTGETPPICAFKLLRDGDKFKVQLTGELQRSYKAKPSDLAVGIDLGFV
YSHILSDGERSPLLSKSESKLENRKQLLQSQLDAKIDQRLTLWLHHPDTGFEQCRELIRVSVETWEKIRECRVAGEVAQ
IIGQKRDKRYMSLRHKLPKSKAEKQLRHQIKNLDRKLADTRKSKDEKLATRLVKKFGHVAIENGLQRQELRERPDPVPN
ESNGHDPNGANAQSEVNKQLKALAPGRKISIIEQRAKRYGRSFVKAESQFTTQECPVCGSLNQPSLKIEETGDRAYHCN
NCGWHCDQDLNAAINIELRSFAFVPQVVLTLMAERARVMSYQKEGDGKIPVNPSWRGKRSAIEGETDSRTKKSKGSSDS
GGRKGKEGAKLKAASRKSQSKAIPKKGSEVLQ
(SEQ ID NO: 623)
>3300005805|Ga0079957_1000538_44|M
[aquatic-freshwater-lake]
MKTLEFKLTLNRSQKARLNDWMTANKWVWNEAVRHIEWFNEFNKYHKPDKKNYPCSPIRSQNFWKKFRGQEPLENYGLG
EFPSCPIGWINDSFDPELPSFPVSRSPKHEQIHNISLFSFIKLFAHSRNQDKPWLLEVPSKFINGEVDCLINSWNAFVK
SPANLKRRPPKYKGKHDKIDALIHNNSKGIGTKGDSINIPKLGYVRVKGFTDRWLFADGKPIDFCPLKICKKASGWYLQ
ISGEVPDRKYRKSESMAGFDLGVHEILTDEKNYHATSPRYLKTSQDKLKRLQRKMSRQFRMNEKDKTWERKNWDKTKIK
LAKAHEKVARQRRTLNHYLSHKAVNTHAVIALEDLKLLNMTKSVKTGEAGVQNGRKAKAGLNRAMLDNGLGQLVGMIET
KAKVADRIVVKVDPKNTSQECPHCGHIEKKANKKNRYVTCSNCGASFHRDTSAAEIIKRRGIARLDGSDTEPKVKKERK
PKYGKRSKPVEPVEAPRPIVDKDLQHLPLFCCA
(SEQ ID NO: 624)
>3300005805|Ga0079957_1019747_2|M
[aquatic-freshwater-lake]
MKTIKIKIKLSSEQAAVCDRYLDELTWLWNLALSNQLHNHCVDWYAWAAKRSADLTKATEKLEKLKPEQQQLVKDYYST
KDKPKLSKKEQELVSKKEFEIFTRWSPFSLEGIIPVPLRLGNSAYEGLSCQIATGGNYWKRDENINIPVNTKKGVIYVK
GYKLVKGDKPWQRIEIVPHKYRTFPSGKYEGRELTTLEKLDNVTGLNTLRAFQNLPDLQVSSHYIGGLLAFFKESWKAF
LDPKRINSRKPKFKKDVDKIATLSNNQCAPNRIDIDKNIVTVTGLTPITIADKNWVKRLNLSQVLPRTYMITKQQSGYY
INIVVAHPLQEEKSVLTNKLPKVKKEFGEDSEEYQDIKSKLKFIEQQIKQSSVLKGKNLSAGIDPGVQAVVSTDHGALF
LPNLTRERISIHIEELQSRLDNAELINDKKWKSLGNKTSRIKTKNESKLQQKISRLHERGANSSNAFNHKLSTRLSRTY
EHISWEDTQVTNLLKQVDPKALPEGVGYAHNGASAKRGLNWIMRQRCLGDLKAKTKQKTENRGGNFHEPPANYSSQICH
CCGQKGERRSQYEFVCKNPDCKLFDVAQQADTNAARNHKQNGGFELGEVKYHNVRLVYQKPKRFKKKRLTK
(SEQ ID NO: 625)
>3300001043|JGI12316014372_10004500_6|M
[aquatic-marine]
MKTLEFKLDLTQEQQALINQWLADLKWVWNRGLRLLEEDQQRRWRDKHGHLLPDSLKLQWRNGQPTGSGVRKTRDGYKY
CAIRQDRDVEDVRKFFSSDSYHNKKNTPQWLHDVPAKFRVGVSAQLKQAWKSYQDPKHPAKRPRYKGKRDCLRSLVNRN
AGGKNKELNPEQIGDSWNAYVRFPKLGKLKVKGFYRRFFPNDGWGSARILVEPSGYYLQVAVEQPDEVVKESDKAVGID
PGVANTLTLDNGRHVKPNAKLDRHQKRLLRLQRRASRQKRGSNSQQRTHQAIARQHEKIRRSRNAFNHKLSTKLTREYG
AIAFEDTQLQNMTRRSKPKPREDGKGWEQNGAKRKTGLNRSLANIAIGDLKQKTKDKATALGREFITPDAKYSSQECHV
CGERGERLSQSVFICLNPDCKEFRCEQHADTNAARNLLLRALPDLEREYRPWGWELKREESVSPTGGTTSNGETPSKLG
MPPEAVTVLC
(SEQ ID NO: 626)
>3300001043|JGI12316J15309_10000277_14|M
[aquatic-marine]
MKTLEFKLDLTQEQQALINQWLADLKWVWNRGLRLLEEDQQRRWRDKHGHLLPDSLKLQWRNGQPTGSGVRKTRDGYKY
CAIRQDRDVEDVRKFFSSDSYHNKKNTPQWLHDVPAKFRVGVSAQLKQAWKSYQDPKHPAKRPRYKGKRDCLRSLVNRN
AGGKNKELNPEQIGDSWNAYVRFPKLGKLKVKGFYRRFFPNDGWGSARILVEPSGYYLQVAVEQPDEVVKESDKAVGID
PGVANTLTLDNGRHVKPNAKLDRHQKRLLRLQRRASRQKRGSNSQQRTHQAIARQHEKIRRSRNAFNHKLSTKLTREYG
AIAFEDTQLQNMTRRSKPKPREDGKGWEQNGAKRKTGLNRSLANIAIGDLKQKTKDKATALGREFITPDAKYSSQECHV
CGERGERLSQSVFICLNPDCKEFRCEQHADTNAARNLLLRALPDLEREYRPWGWELKREESVSPTGGTTSNGETPSKLG
MPPEAVTVLC
(SEQ ID NO: 627)
>3300001341|1010336|scaffold_14_1570|P
[aquatic-marine]
MKTLEFKLDLTQEQQALINQWLADLKWVWNRGLRLLEEDQQRRWRDKHGHLLPDSLKLQWRNGQPTGSGVRKTRDGYKY
CAIRQDRDVEDVRKFFSSDSYHNKKNTPQWLHDVPAKFRVGVSAQLKQAWKSYQDPKHPAKRPRYKGKRDCLRSLVNRN
AGGKNKELNPEQIGDSWNAYVRFPKLGKLKVKGFYRRFFPNDGWGSARILVEPSGYYLQVAVEQPDEVVKESDKAVGID
PGVANTLTLDNGRHVKPNAKLDRHQKRLLRLQRRASRQKRGSNSQQRTHQAIARQHEKIRRSRNAFNHKLSTKLTREYG
AIAFEDTQLQNMTRRSKPKPREDGKGWEQNGAKRKTGLNRSLANIAIGDLKQKTKDKATALGREFITPDAKYSSQECHV
CGERGERLSQSVFICLNPDCKEFRCEQHADTNAARNLLLRALPDLEREYRPWGWELKREESVSPTGGTTSNGETPSKLG
MPPEAVTVLC
(SEQ ID NO: 628)
>3300027607|Ga0207422_1002635_7|P
[aquatic-marine]
MKTLEFKLDLTQEQQALINQWLADLKWVWNRGLRLLEEDQQRRWRDKHGHLLPDSLKLQWRNGQPTGSGVRKTRDGYKY
CAIRQDRDVEDVRKFFSSDSYHNKKNTPQWLHDVPAKFRVGVSAQLKQAWKSYQDPKHPAKRPRYKGKRDCLRSLVNRN
AGGKNKELNPEQIGDSWNAYVRFPKLGKLKVKGFYRRFFPNDGWGSARILVEPSGYYLQVAVEQPDEVVKESDKAVGID
PGVANTLTLDNGRHVKPNAKLDRHQKRLLRLQRRASRQKRGSNSQQRTHQAIARQHEKIRRSRNAFNHKLSTKLTREYG
AIAFEDTQLQNMTRRSKPKPREDGKGWEQNGAKRKTGLNRSLANIAIGDLKQKTKDKATALGREFITPDAKYSSQECHV
CGERGERLSQSVFICLNPDCKEFRCEQHADTNAARNLLLRALPDLEREYRPWGWELKREESVSPTGGTTSNGETPSKLG
MPPEAVTVLC
(SEQ ID NO: 629)
>3300007960|Ga0099850_1030516_|P
[aquatic-marine-aqueous]
MNTITKVRKIEFKVTLDAQQRQVFEHHSRDLRFIWNTGLACIQWREWWEKWQQVLESPDRVGYEPETVPINWACNIVKS
PKKKKKDEESEKKVYALACDRVQYRLEKTTNLELGTGEWTEPRKDRNGKIDEDHCWVAYPCKPEPVREHWTEEPRLLLL
MKNPYMALRTMFAKKNWDPETVEGKIIHGLNTAWVAGECKALGDAWSSYKSGVRKRPRFKKRHDRSNLINPSSKQTKFS
GNSLTLPGLGRVTVKGLQQRWGEKPACPIALIKEGDEFYLQLTGELEIPVVRSNKVTIGIDPGSVRLATTDNGAVIEAH
KFGKQMTRRQKKLQASINRKLRLNSDRVYDESDSSRFYLKPRKNWKRKNLQKVRTKLQKLSAKTARQRRAYNHFHSTRI
VQSADVIIMEGLELKNVTRAVKKGKSGEHNKRKAKAGLNRSLLDNAIGQFYGMIEQKAKDAGKVTARVNPFRTSMTCNK
CGFSDAKNRKTQAGFHCQKCGHSDNADRNAALNIKRMGVLGVTKLTFDNDWNITVPGWIEPGDLVALHSKGLKPVGTAK
KRSKRAGKEHPSQLALEIGSQ
(SEQ ID NO: 630)
>3300028735|Ga0272446_1017865_2|M
[aquatic-thermal springs-microbial mat]
MSQNNLTPKNIQHGCRLTKMQQQICEQWLDELRRLWNEALSYLLEVEENTVYNFADKCRYAVCKLSTEYRHYRWDDADG
EPPINHYKVEESVDESRKKRTAGTYIFVPYTVCVAPKKPYAPICPIPQGHNHLDWTGSSGTFPEGFLRLDPSKLNRATG
YAKLALLQKFTHKNCPHLKHIPANFIRGVLFSLATAWEKRFQRRDKYGRPGYPKFKSRKFPLTSLQYVDAVNLKREGDS
LRFPVLGCVTARGISERFPVDIEIKVATLQKQPDGWYMIWNGWFPAIVAKPKNRSIAISFRQNNNLYVADNGYVMMPYQ
PPEQKLRRLERLRQILCGKQFLSKNWHRVKAKIAKYEHRLAMARRNHNHKISTFLVRKYDQLVVDNRKLGLIRKPEPIP
VGVTPPRWAPNGATAVSEINQRKAHNAKGQFRNMVIEKSKTYQRAVRLAPVEPPSNTPS
(SEQ ID NO: 631)
>SRR6869054_1535443_5|P
[biofilm metagenome]
MKTLEFKLDLTQEQQALINQWLADLKWVWNRGLRLLEEDQQRRWRVKHGHPLPDSLRLKWRNGKLVGCGIRKSREGYLC
CPVRQDRDIEDARKLFASDSYHNKRNAPQWLHDVPARFRVGVRAQLKQAWKSYQDPKHPARRPRYKGKRDRLRSLTNLN
AGGKKKELSPEQIGDSWNAYVRFPKLGRLKVKGFYKRFLPNDGWGSARILVEPSGYYLQVAVEQPDEPVKESDKAVGID
PGVANTLTLDNGRHVKPNAKLDRGQKRLLRLQRKASRQQRGSNSQQRTYQAIARQHEKIRRSRNAFNHKLSTKLTREYG
AIAFEDTQLQNMTRRSKPKPREDGKGWEQNGAKRKTGLNRSLANIAIGDLRQKTKDKAAELGREFVTPDAKYSSQECHA
CGEKGERLSQSVFICLNPDCKEFNCEQHADTNAARNLLLRALPDLEREYRPWGWELKREESVSPTGGTTIFGETPSKLG
MPPEAAMVSV
(SEQ ID NO: 632)
>SRR6869054_457352_2|P
[biofilm metagenome]
MILCQEFAVELSPPQEKNAIAWLEASKSLYNSALYELLRWDENTGFYCKETKSYLPCCSVPWEYRWHKESETLIPFSRI
ASEKSRWYIKNLPRHRVPTPAEEKDSWGWHCKDGGSGYSCPIPKDYCEPLLTRWERQARGGLGLVAKGDYWEKGHSVLD
IPYKFRSGVLTMLETPWQEYLKSRFGQTTVKRGCPRFKRKRDRINTLIHPNPKGVIVPNRNQLKGVPKLGSLKVKGLVR
RWRNPDGFVPPISIFKLIRRQGQWFVQLTGDLERSYPVKNTNRALGIDPGLKLEFGTSDGWSLPAARRYRKGQKQREKL
QKQIAHKRKHNLVLWLNQAERQLQDVAGTIIPLKAESWAALQQCRTEKEFINLIGAARYNRLKYSVPTSNKILKLEERA
AKHEARIARTRKAADDKLTSRIVREYGFIAIEHGLQGQKLRGKAKAKKREDGKGYAQTGAKRKSGVSKSLSDASIGRKT
AMLERKAKRSNRTFAKIESAYTSQSCPVCGHLHKAPMDGDRVYHCECCGWHCDRDQSAGINIELMAYAANSTAKLSSAA
ELARVYGCFWMQDNPKETKPLWAKKLSKKKLAEWMKNIRASYPDKVLQNFELEYRKMKAQK
(SEQ ID NO: 633)
>SRR6869055_1317318_5|P
[biofilm metagenome]
MKTLEFKLDLTQEQQALINQWLADLKWVWNRGLRLLEEDQQRRWRVKHGHPLPDSLRLKWRNGKLVGCGIRKSREGYLC
CPVRQDRDIEDARKLFASDSYHNKRNAPQWLHDVPARFRVGVRAQLKQAWKSYQDPKHPARRPRYKGKRDRLRSLTNLN
AGGKKKELSPEQIGDSWNAYVRFPKLGRLKVKGFYKRFLPNDGWGSARILVEPSGYYLQVAVEQPDEPVKESDKAVGID
PGVANTLTLDNGRHVKPNAKLDRGQKRLLRLQRKASRQQRGSNSQQRTYQAIARQHEKIRRSRNAFNHKLSTKLTREYG
AIAFEDTQLQNMTRRSKPKPREDGKGWEQNGAKRKTGLNRSLANIAIGDLRQKTKDKAAELGREFVTPDAKYSSQECHA
CGEKGERLSQSVFICLNPDCKEFNCEQHADTNAARNLLLRALPDLEREYRPWGWELKREESVSPTGGTTIFGETPSKLG
MPPEAAMVSV
(SEQ ID NO: 634)
>SRR3137750_862387_23|M
[crustacean metagenome]
MPKAKPTDKEKDKRPIKTLEFKLYPNQSQVLTLTDWLDRGRKVWNNGLAVLLEKDQQDWRKKAGFDPMEGSEAWQWFPN
QVGSKTVFGACCAITFYNRRQNEHYPACPIRHPQDVDGAPRSLIYRATQLDNFCTRFKGGIGDDLLESWKAYKDKNRPT
AKLPKFKGKQFPLKSLSNGECTAKIVGKTAIKFPLLGNIRTKGLERVPQDSKICTARICRKASGWYLQLAIRWDWPVPN
VKMPDVAVAIDPGVRFATSTDYGRQVDAPQFMLKQTKKLRREQRKLSRRKLKGKNWQKQAAKIARLHEKVSRQRNAFWH
KESTYFVTSFGGVAIEDNNFNNMGRKAKAKPKEDGKGYERNNQAQKRGLNRSLKDVACGRLKVMVETKAKTINNEVHLV
RSHHNSQTCSECGHVAKDNRKSQSNFSCVACGHSLNADINAAINIYNRAAWSNRYNLHPVRLQVSNLERYPSFVGGIGK
SHKPASASRKSRNGIEGQQEGGSLPPLEITKESRSPGLTRNKPASVSPSIGKPKRGQKPSTLCQIPETHTQLTLWDLTG
(SEQ ID NO: 635)
>SRR3138838_558748_1|P
[crustacean metagenome]
MENMTRVIKFRLTLTQNQQSLIDEKMRLLKYLWNLAVGLQEEVNQRRLRDKFEFKEFSPEFWETSYLSLYSSFPHIEKL
PKDKIKLLAGNPCCKIAYLKNKKEYVSLKLEERKKRPYLGNPDAKKHTTKPPDKEDLKKYFYSDLADKIFEIGSEFRGC
FYRYVISKAFETAKKGIRGFPKYKGKLDSVQSLIVGHPTLIKVRDGGIFLNKQIGLLVIDDINRLPKESDVRMASIVRK
ASGYYLHLTINLPVPMHFPSDRQIGIDVGCVNLYTDSEGRHIETKAYYRNKERKIAHLQRKMARQEKGSANYLKSKEKL
ALLHEQIKDRRAGYLHQVSHKLTQKYSHIAMEDLKLKNMTKRAGVKENEDGTYAHNGASAKSGLNKSILDQGIGELKRQ
LIYKSQEKGGRVVLVNPKYTSQTCFNCGHKHKDNRKSQSEFICVSCGYSANADENAAKNILTLSLISSTIGVLRSSLLS
YPSLLGKAVSLLAYVCGSPKGTCEAERERSDPPINPPVKGGNCLDNFSTLTINPRHQSEKVSQPIDSVQLTIW
(SEQ ID NO: 636)
>SRR3139299_296800_1|M
[crustacean metagenome]
MSNFSENVRTKEFKLILSSEQERTLEDWMLVCKWVWNRSLGLIEEFNEWNPYDKLSKSNVPATPLQRYDRKLKQWVRIE
IPDWKMGIERVEKKRGLIHPVAIDENSPIIDSLDSKKSVLYGFLKVFGHQHHKDRIVTYLVRGEERKVNFTDCPAKFIQ
GVAHELSKAWEGFLAGRHSRPRFKTAKDKVMTLIHYNAKDLGVKDSKVNIPKLGYIEVIGFDKRWYGCDFNPMKICKKA
SGWYIQLTASVTVKQAKKTGLCCGIDPGHQFVMALDNGHTIEAAQPLKRSLKRLRKMQQQLSRKYRMNEGKTKNWEKLN
NKIAKLHEKIARHRRSFNHWHSTNLINWFDVIFVEDYKPANVYRKAKAKAKLDTEGNPVVAENGTVIYDKNSQKRKRGS
NRTGSDVAIGQAIDLLETKAKEHGKLVIRVDNWGTTLCCAKCGHQEKKKLSQRTHKCSNCGYTVARDVNSGQNIKLKGL
AQMAINQGVELSDNFWYKFLINKNSATPSCSKKATKKKPKKSDTITIPGDLFKNGVHDFLVAETAKTHAIINQMSLGDF
DRNA
(SEQ ID NO: 637)
>SRR3139690_493772_1|M
[crustacean metagenome]
MLPKRHAYIGATCELIRDGGWWAKDESATPIAYRGKKLSADKLAKTKESDIWWSDGVAHERLYKFPMSKWMPPKPGKIP
QDVANKPFQYMRVPSTLGGGLEIKKFEQLNNAKHLKEFGIHLPPGVSHFLCGLFAQFSESYKAWIDPKRPNAHKPRYRQ
PDDLMRSLYSNQMRYSTTYGCNAAPIEFLSRDGVGVIAMNSIFGDVEMYRGEIDRMPDGLIPRSFNFTQDASGYYISVV
FCTMAEVNNTFAKAQYRRFAGKADEDRKAELKAAVDDAAAALKAETYNPGNGKTLGIDPGIKRQITAHDGEKTFHVKLS
KRRHDKARRLVNRIDRLKSKLSRIKTANNIRLNAGKDLRRAAGVITIDGVTTTLKNEAKLQHRIRRLQLLQANMRRAYQ
HRVAVRLFRGGYSTIRFEATQVGNMSKRSKVKIKANGKYAKNNAAAKSGLNKSLANTAMAAQSTKIEARFKAAGRSFIA
VPAHNTSQICHCCQIKGDRASQELFLCLNNLCVMAGIRQNADDNAAKNMYRETLATEPKRSTGSGLELGEEGDIDD
(SEQ ID NO: 638)
>SRR3139690_185157_1|M
[crustacean metagenome]
MDTSIVDQQQTETELSVIEFKLSPHNEAVKAWEYQLNELKTVWNSALALRIEADDRYWIKRLNLDAVCPSTALKRKGNK
KQGKGQSPTQWRTIASGVVRPEKTKPIRARGAKTGIIAGPYCRVRKLQGVEPLDKQIIDADGNKITSALSRTQAISNYP
WLDSSLVDSRYIAGVYRTLDQAWKAYKKGVRNRPKFKGKKDKLKSLANYSGSVRFERIGGGPNGWVNFPKLKPVKCKGL
YKRYDDRMKTGTVKLCKKGGNWYLQLTRKDVPFNRLSDSDKAIGIDLGVKQNATTSEGKVYHCKQSKRIQQRIERLQRK
AARQYRMNADEKHPTGRSTLGHQRTIGEISRLQDKQKRSRHAWQHKTSTKILKSNGVIVFEDLKLQNMTKRPKPKSDEK
GGYAKNGAKAKAGLNRVILKSGLGGLRSKVESKGDRNNRTVIRVNPAYTSATCSNCGHRHTKEEKASYRPTQSQFICQK
CGHTDNADINAAENILVSGLTMLDTV
(SEQ ID NO: 639)
>SRR3139690_493772_1|P
[crustacean metagenome]
MKAIRFKVCPTDEQVRSFNDLRSDLTQVWNLIHRVAMHNRSVEWFRWAEKTSSKDGSWDLHDCSLTPIMLPKRHAYIGA
TCELIRDGGWWAKDESATPIAYRGKKLSADKLAKTKESDIWWSDGVAHERLYKFPMSKWMPPKPGKIPQDVANKPFQYM
RVPSTLGGGLEIKKFEQLNNAKHLKEFGIHLPPGVSHFLCGLFAQFSESYKAWIDPKRPNAHKPRYRQPDDLMRSLYSN
QMRYSTTYGCNAAPIEFLSRDGVGVIAMNSIFGDVEMYRGEIDRMPDGLIPRSFNFTQDASGYYISVVFCTMAEVNNTF
AKAQYRRFAGKADEDRKAELKAAVDDAAAALKAETYNPGNGKTLGIDPGIKRQITAHDGEKTFHVKLSKRRHDKARRLV
NRIDRLKSKLSRIKTANNIRLNAGKDLRRAAGVITIDGVTTTLKNEAKLQHRIRRLQLLQANMRRAYQHRVAVRLFRGG
YSTIRFEATQVGNMSKRSKVKIKANGKYAKNNAAAKSGLNKSLANTAMAAQSTKIEARFKAAGRSFIAVPAHNTSQICH
CCQIKGDRASQELFLCLNNLCVMAGIRQNADDNAAKNMYRETLATEPKRSTGSGLELGEEGDIDD
(SEQ ID NO: 640)
>WP_015957291.1
[Cyanothece sp. PCC 8801]
MFAIKSMSELVQHHITIQLKAYLSTTQTALFENWTDSLRPLYNLALGLLYEEQQRRWRTNQKFLKNYLDKSSLQTYLNE
IENKPDIYPVEWHITKALPECDWLTKEENEVRKKDNTKSLACRTINRDGNFFTPIRPYWHLEEPQKLAKFKCFTNQWLI
SCNLLTNYHLQKLLNVNMKVRQSFISMNLMEAWKRYQKGDFRKLKFKSKRNPVISLCNKQTNRIKFDPEANNCQLLGKE
FGLIEFRGLHNRHQGQIQPRNGSLTKKADGYYLNLVFQVEHKPIPDSDLQVGIDPGLVTLLTLSDGKCISNQRFLKENE
RHLTVLQKKLSRQTPGSKNWEKTKKALAKIHKQTADHRKYYNHKVSTHLVNKYGAIAIEDTKLTNMNKRPKAEKREDGK
GYEHNGAKAKAGLNQSFHDAGLGQLRAFLESKANSYENRHIERVRANYTSQKCSRCGHTDSENRLTQASFHCLKCGLEM
PADLNAAINIEQTAFGLDKS
(SEQ ID NO: 641)
>CP001287_4134|P
[Cyanothece sp. PCC 8801]
MKEKHGLVDQAMFAIKSMSELVQHHITIQLKAYLSTTQTALFENWTDSLRPLYNLALGLLYEEQQRRWRTNQKFLKNYL
DKSSLQTYLNEIENKPDIYPVEWHITKALPECDWLTKEENEVRKKDNTKSLACRTINRDGNFFTPIRPYWHLEEPQKLA
KFKCFTNQWLISCNLLTNYHLQKLLNVNMKVRQSFISMNLMEAWKRYQKGDFRKLKFKSKRNPVISLCNKQTNRIKFDP
EANNCQLLGKEFGLIEFRGLHNRHQGQIQPRNGSLTKKADGYYLNLVFQVEHKPIPDSDLQVGIDPGLVTLLTLSDGKC
ISNQRFLKENERHLTVLQKKLSRQTPGSKNWEKTKKALAKIHKQTADHRKYYNHKVSTHLVNKYGAIAIEDTKLTNMNK
RPKAEKREDGKGYEHNGAKAKAGLNQSFHDAGLGQLRAFLESKANSYENRHIERVRANYTSQKCSRCGHTDSENRLTQA
SFHCLKCGLEMPADLNAAINIEQTAFGLDKS
(SEQ ID NO: 642)
>WP_015785111.1
[Cyanothece sp. PCC 8802]
MFAIKSMSELVQHHITIQLKAYLSTTQTALFENWTDSLRPLYNLALGLLYEEQQRRWRTNQKFLKNYLDKSSLQTYLNE
IENKPDIYPVEWHITKALPECDWLTKEENEVRKKDNTKSLACRTINRDGNFFTPIRPYWHLEEPAKLAKFKCFTNQWLI
SCNLLTNYHLQKLLNVTMKVRQSFISMNLMEAWKRYQKGDFRKLKFKSKRNPVISLCNKQTAIIKFDPEANNCQLLGKE
FGLIEFRGLHNRHQGQIQPRNGSLTKKADGYYLNLVFQVEHKPIPDSDLQVGIDPGLVTLLTLSDGKCISNPRFLKENE
RHLTVLQKKLSRQTPGSKNWEKTKKALAKIHKQTADHRKYYNHKVSTHLVNKYGAIAIEDTKLTNMNKRPKAEKREDGK
GYEHNGAKAKAGLNQSLHDAGLGQLRAFLESKANSYENRHIERVKANYTSQKCSRCGHTDKENRLTQASFYCLKCGLEM
PADLNAAINIEQAAFGLDKS
(SEQ ID NO: 643)
>NC_013161_4122|P
[Cyanothece sp. PCC 8802]
MKEKHGLVDQAMFAIKSMSELVQHHITIQLKAYLSTTQTALFENWTDSLRPLYNLALGLLYEEQQRRWRTNQKFLKNYL
DKSSLQTYLNEIENKPDIYPVEWHITKALPECDWLTKEENEVRKKDNTKSLACRTINRDGNFFTPIRPYWHLEEPAKLA
KFKCFTNQWLISCNLLTNYHLQKLLNVTMKVRQSFISMNLMEAWKRYQKGDFRKLKFKSKRNPVISLCNKQTAIIKFDP
EANNCQLLGKEFGLIEFRGLHNRHQGQIQPRNGSLTKKADGYYLNLVFQVEHKPIPDSDLQVGIDPGLVTLLTLSDGKC
ISNPRFLKENERHLTVLQKKLSRQTPGSKNWEKTKKALAKIHKQTADHRKYYNHKVSTHLVNKYGAIAIEDTKLTNMNK
RPKAEKREDGKGYEHNGAKAKAGLNQSLHDAGLGQLRAFLESKANSYENRHIERVKANYTSQKCSRCGHTDKENRLTQA
SFYCLKCGLEMPADLNAAINIEQAAFGLDKS
(SEQ ID NO: 644)
>OVJI010000022_17|P
[freshwater bacterium LH6-2 Bacteria.]
MKTICVKVRLTPEQEQEFKSAIDELEWIWNFSLKVHLYNHCIKWYDWAANTKQKIDKAIAEMDKLPPKQKEFVHNYFLG
DPQLRPTKLDQSQRKLVDKEVYKILERWSPFDLEGIEKVPLRISERSAYFNASCVIAENGPYWFSEVIEQTDDQGEVIG
KTKKWKLAQGRKPYTPLPKIPHKYILAPSGQYKDREIIDWTDLVVKAVLTSVRESEGLPPLNIHSNYINGLVSQNGSLQ
KAWVAFLDTSRQQSKRPKFKNEENRLNTLLNLYPPTILDEENSIEVRQLGKLEVVDRNWRKRLGQNISLRSHCITKKRS
GYYVHVTVEHALQSEKTILVKQLTKIKKEKGVESQEYVELSEKITEMENTIRDSKVRLNKKQLSVGVDPGIQAVIATDQ
GDLYTPNLSRERITMHLEKLQHKLKHMQEINNAAWRQENTHKIEAGEQIDIKEKRPKTKNELKLEHKIARLHERGASSA
RHFNHKLSSRIARTYTHVCWEDTKLENLLKQCKAKPDLSGIGYLPNGAAAKRGLNWLLKQRCLGDLKERTKQKVLEYGG
VWHNSAPKYSSQRCHCCGYEEPLQRDGSNFTCKNQDCELFGVSQNADVNAARNHKKSVFELGQVKYHNLSLQYNISARR
RHRNRNKPKLTVVKLPE
(SEQ ID NO: 645)
>CAAAFE010002307_2|M
[freshwater metagenome]
MVTNRRIEFKVSLDQQQQQIFDHHIAKLQAVWNIGLACIEWREWWEKWQQVLESPDHPDYAPDAVPMGWGHNSIKGKKK
PVYGLCCDRVKFRLEKNDPILDVGEWVEGTKKGSGDSIAGYWVAYPAKPDPVKEHWVEDPRLPKHGQDPYMSLVSMFGK
KYWPSDHFIQGLSSAWIKGQCKNLATAWKAYKKGIRKRPQFKKRHEAGNSLLCVTRIPLKQNGMTLPGMGFVRIPKLAQ
RWDSIKDPCPISLLREGSRYYVQLTATLEQRPVRSNGVTVGIDPGSVHVATDDRGRMIDSPRYAKKQERRKRRLQRSMA
RKFRLNTTTVYDEDGRVLRHEPRKGWKRRNHAKVKQQLQSLEAHTKRARRAFNHFHSTRIVQSADVIVLENLQLQNIGA
KVKTGKTGISNGRKRKTGLNNKLRDNAIGQLFAMVEQKAAAAGKLTTRVNPFRTSMTCNRCGFSDKANRVSQAVFHCQS
CGHRANADQNAAANIRKMGLLGVTKLTFDNDWRITVPNWHD
(SEQ ID NO: 646)
>OGWG01000020_5|P
[freshwater metagenome]
MTIMKTICIKVKLSPEQEREFSNATQELEWIWNFSLKTYIHNHCVKWYEWATGIKVKIDKALAEIEKLPPEQKEFVYNY
FLNPSLRPSKMTQQQNKLVDKEVYKILTMWSPFDFDGITKVPLRLSERSAYIGASCAIAEGGPYWISEIIEEKDESGEV
IKHRKWKLVNGKPYMPINKKEHSYPLVPSGQYKDREIIDWTDLVVKAVLTSVRESEGLSPLTLHSNYINGLVSQNGSFQ
KSWSAFLDVKRMQSKRPKFKNEEYKLNTLLNLYPPTISEDEDWIEVRQLGKLEVIDRNWRKRMGGDSPRSHCITKKKSG
YYVNITTEHPLHSEKTVLLKQLAKIKKEQGKDSQEYLDLEATIASMTEKIRGSKVKPKNKELAVGIDPGINAIIATDQG
DLYMPNLSRERITFHIEKLQAKLKHMQDVNDKVWRQENQRQLEDGEKLEIKTKRPKTNNELKLEHKIARLHERGASSSR
HFNHKLSSRIARTYKHVCWEDTKIENLMKSPKAKPDLSGIGYLPNGAAAKRSLNWLFKQRCLGDLKERTKQKVLEYGGV
WHDSAPKYSSQKCHCCGYTEPLQRDGSNFTCKNEACKMYGISQSADVNAARNHKKSVFELGEVKYHNLSLEYNVSARWK
HRNRNKVKPVVSVTKLPTTSTPVPNKPK
(SEQ ID NO: 647)
>OGWG01000020_4|M
[freshwater metagenome]
MKTICIKVKLSPEQEREFSNATQELEWIWNFSLKTYIHNHCVKWYEWATGIKVKIDKALAEIEKLPPEQKEFVYNYFLN
PSLRPSKMTQQQNKLVDKEVYKILTMWSPFDFDGITKVPLRLSERSAYIGASCAIAEGGPYWISEIIEEKDESGEVIKH
RKWKLVNGKPYMPINKKEHSYPLVPSGQYKDREIIDWTDLVVKAVLTSVRESEGLSPLTLHSNYINGLVSQNGSFQKSW
SAFLDVKRMQSKRPKFKNEEYKLNTLLNLYPPTISEDEDWIEVRQLGKLEVIDRNWRKRMGGDSPRSHCITKKKSGYYV
NITTEHPLHSEKTVLLKQLAKIKKEQGKDSQEYLDLEATIASMTEKIRGSKVKPKNKELAVGIDPGINAIIATDQGDLY
MPNLSRERITFHIEKLQAKLKHMQDVNDKVWRQENQRQLEDGEKLEIKTKRPKTNNELKLEHKIARLHERGASSSRHFN
HKLSSRIARTYKHVCWEDTKIENLMKSPKAKPDLSGIGYLPNGAAAKRSLNWLFKQRCLGDLKERTKQKVLEYGGVWHD
SAPKYSSQKCHCCGYTEPLQRDGSNFTCKNEACKMYGISQSADVNAARNHKKSVFELGEVKYHNLSLEYNVSARWKHRN
RNKVKPVVSVTKLPTTSTPVPNKPK
(SEQ ID NO: 648)
>OGWL01001214_2|P
[freshwater metagenome]
MNTITKVRKVEFKVALDVQQQQVFEHHSRDLRFIWNTGLACIQWREWWEKWQQVLESPDRVGYAPEPVQMDWGYNLVGK
KKVYGLVCDRVRFRLEKSEPVLAAGEWVAGEKQGGGYWVAYPCKPEPVREHWTEEPRLPLLMKNPYMALRTMFAKKNWD
PETIGGKIIHGLNTAWVAGECKALGDAWSSYKSGVRKRPRFKKRHDRSNLINPSSKQTKFSGNSLTLPGMGRVAVKGLQ
QRWGDKPACPIALIREGDEFYLQLTGEVQVPAVRSNKITIGIDPGSVRMATTDNGAVIDAPKFGKRIKRRQEKLQASIN
RKLRLNSDRVYDESDSSKFYLKPRRNWKRKNLQKVRTKLQRLSAKAARQRRAYNHFHSTRIVQSADVIIMEGLELKNVT
RAVKKGKSGEHNKRKAKAGLNRSLLDNAIGQFYGMIEQKAKDAGKATTRVNPFRTSMTCNKCGFSDAKNRKTQAGFHCQ
KCGHSDNADRNAALNIKRMGVLGVTKLTFDNDWNITVPGWVEQKTVEPLQVRDFKPVGTVKKRSKKTEQKRSSQMALEI
GSP
(SEQ ID NO: 649)
>OGW001000325_8|P
[freshwater metagenome]
MDNYIETTRTKEFKLILTPEQERTLENWMLVCKWVWNRSLGLIEEFNDWNPYDKLSKSYAPAMPLQRYDRKLKQWVRVE
IPEWKLNTKTKETSKGLVHPVSIDENSPQIDSLNSKKSVLYGFLKIFGHQYHKDRIITYMVRGEERKVKFTDCPAKFIQ
GVSHELSKAWDGFLAGRHSRPRFKTAKDKVMTLLHYNAKDIGIQGSKINIPKLGYVEVIGFDKRWYGVDFNPMKICKKS
SGWYIQFTAVVPVKKFKKTGLACGIDPGHQFVMALDNGHIIKAAQPLKQNLRRLRRMQKQLSRKYRMNNGKTKNWEKLN
QRIAKLHEKIARHRRSFNHWHSTNLVKWFDIIFVEDYKPANVYRKAKAKAKTDEQGNPVTAENGAVIYEKNNQKRKRGN
NRTGRDIAIGQAIELLETKAKEHGKLVIRVPAYGTTLCCAKCGHEERKSLSQRVHHCSSCGYIVARDVNSGQNVKLKGL
AQLALDHGVELSDNFWYQILKNATIDSCSGKKGKKTTKKKDAVSIPGDLFKNGIAAFLITETAKTRAIIERNHLENLNK
TAKSLMG
(SEQ ID NO: 650)
>OGWP01000327_5|M
[freshwater metagenome]
MKTICIKVKLSPEQEREFSNATQELEWIWNFSLKTYIHNHCVKWYEWATGIKVKIDKALAEIEKLPPEQKEFVYNYFLN
PSLRPSKMTQQQNKLVDKEVYKILTMWSPFDFDGITKVPLRLSERSAYIGASCAIAEGGPYWISEIIEEKDESGEVIKH
WKLVNGKPYMPIRKNKKEHSYPLVPSGQYKDREIIDWTDLVVKAVLTSVRESEGLSPLTLHSNYINGLVSQNGSFQKSW
SAFLDVKRMQSKRPKFKNEEYKLNTLLNLYPPTISEDEDWIEVRQLGKLEVIDRNWRKRMGGDSPRSHCITKKKSGYYV
NITTEHPLHSEKTVLLKQLAKIKKEQGKDSQEYLDLEATIASMTEKIRGSKVKPKNKELAVGIDPGINAIIATDQGDLY
MPNLSRERITFHIEKLQAKLKHMQDVNDKVWRQENQRQLEDGEKLEIKTKRPKTNNELKLEHKIARLHERGASSSRHFN
HKLSSRIARTYKHVCWEDTKIENLMKSPKAKPDLSGIGYLPNGAAAKRSLNWLFKQRCLGDLKERTKQKVLEYGGVWHD
SAPKYSSQKCHCCGYTEPLQRDGSNFTCKNEACKMYGISQSADVNAARNHKKSVFELGEVKYHNLSLEYNVSARWKHRN
RNKVKPVVSVTKLPTTSTPVPNKPK
(SEQ ID NO: 651)
>OGWP01001429_1|P
[freshwater metagenome]
MHTTKTRKIEFKVRLDLQQQQVFEHHSQALRFIWNTGLACIHWREWWEKWQQVLESPDRPGYCPDPVDMGWGHNLVGEK
KVYGLCCDRVRFRLEKEEPVLGVGEWIEGEKLGSGKRVAGYWVAYPAKPDIVREHWEQEPRLVLLMKNPYKALKTLFAK
KNWDPDSVEGKIIHSLNTSWVAGECKALGDAWSSYKSGVRKRPRFKKRHKRSNLINPSSKQTKFFKNSLTLPGMGRVTV
KGLDKRWGNKPACPIALIKEGSDFYLQLTGAVEVRTVRSNRSNGVAIGIDPGSVHVATDDHGKTIEPPRYGKKAMRRIQ
KLQASINRKLRINSEKVYDPENPEKFYLKPDKNWKRKNLKKVRAKIQRLSAKVVRSRRAFNHFHSTRLVQSADTIVLED
FKLKNVTRAVKEGESGVQNGRKAKAGLNKNLLDNAIGQLYGMIEQKAKDAGKMTARVNPFRTSQTCNRCGFSDGKNRPS
QAVFRCQKCNHCDNADRNAALNIKRMGMLGVTKLTFDNDWNITVPGWVAAAPAEPSKPHKPVKPADSSLSKDLKPKNDC
PSARSKPKTIEGSQMKLAL
(SEQ ID NO: 652)
>OGWP01001429_1|M
[freshwater metagenome]
MKPFLSIPSMHTTKTRKIEFKVRLDLQQQQVFEHHSQALRFIWNTGLACIHWREWWEKWQQVLESPDRPGYCPDPVDMG
WGHNLVGEKKVYGLCCDRVRFRLEKEEPVLGVGEWIEGEKLGSGKRVAGYWVAYPAKPDIVREHWEQEPRLVLLMKNPY
KALKTLFAKKNWDPDSVEGKIIHSLNTSWVAGECKALGDAWSSYKSGVRKRPRFKKRHKRSNLINPSSKQTKFFKNSLT
LPGMGRVTVKGLDKRWGNKPACPIALIKEGSDFYLQLTGAVEVRTVRSNRSNGVAIGIDPGSVHVATDDHGKTIEPPRY
GKKAMRRIQKLQASINRKLRINSEKVYDPENPEKFYLKPDKNWKRKNLKKVRAKIQRLSAKVVRSRRAFNHFHSTRLVQ
SADTIVLEDFKLKNVTRAVKEGESGVQNGRKAKAGLNKNLLDNAIGQLYGMIEQKAKDAGKMTARVNPFRTSQTCNRCG
FSDGKNRPSQAVFRCQKCNHCDNADRNAALNIKRMGMLGVTKLTFDNDWNITVPGWVAAAPAEPSKPHKPVKPADSSLS
KDLKPKNDCPSARSKPKTIEGSQMKLAL
(SEQ ID NO: 653)
>SRR3989431_2283179_3|M
[freshwater metagenome]
MSNFSDNVRTKEFKLILSSEQERTLEDWMLVCKWVWNRSLGLIEEFNEWNPYDRISKSNVPATPLQRYDRKLKQWVRIE
IPDWKMGIERVEKKRGFIHPVAIDENSPVIDSLDSKKSVLYGFLKMFGHQHHKDRIVTYLIRGEERKVNFTDCPAKFIQ
GVAHELSKAWEGFLAGRHSRPRFKTAKDKVMTLIHYNAKDLGVKDGKINIPKLGYIEVIGLDKRWYGCDFNPMKICKKA
SGWYIQLTASVPIKQAKKTGLCCGIDPGHQFVMALDNGHTIEAAQPLKRGLKRLRKMQQQLSRKYRMNGGKTKNWEKLN
NKIAKLHEKIARHRRSFNHWHSTNLINWFDVIFVEDYKPANVYRKAKAKAKLDTEGAPMVAANGTAIYEKNNQKRKRGS
NRTGNDVAIGQAIDLLETKGKEHGKLVIRVDNWGTTLCCAKCGHQEKKKLSQRTHKCSNCGYTVARDVNSGQNIKLKGL
AQMAINQGVELSDNFWYKFLIDKNSATPSGSKKATKKKPKKSDTVIIPDDLFKNGVHEFLIGETAKTRAIINEMSLGNF
DRNA
(SEQ ID NO: 654)
>SRR3989431_168870_5|M
[freshwater metagenome]
MSSNFSENVRTKEFKLILSSEQERTLEDWMLVCKWVWNRSLGLIEEFNEWNPYDKLSKSNVPATPLQRYDRKLKQWVRI
EIPDWKMGIERVEKKKGLIHPVAIDENSPIIDSLDSKKSVLYGFLKVFGHQHHKDRIVTYLVRGEERKVNFTDCPAKFI
QGVAHELSKAWEGFLAGRHSRPRFKTAKDKVMTLIHYNAKDLGVKDSKINIPKLGYIEVIGFDKRWYGCDFNPMKICKK
ASGWYIQLTASVPVKQAKKTGLCCGIDPGHQFVMALDNGHTIEAAQPLKRSLKRLRKMQQQLSRKYRMNEGKTKNWEKL
NNKIAKLHEKIARHRRSFNHWHSTNLINWFDVIFVEDYKPANVYRKAKAKAKLDTEGNPVVAENGTVIYDKNSQKRKRG
SNRTGSDVAIGQAIDLLETKAKEHGKLVIRVDNWGTTLCCAKCGHQEKKKLSQRTHKCSNCGYTVARDVNSGQNIKLKG
LAQMAINQGVELSDNFWYKFLINKNSATPSCSKKATKKKTKKSDTITIPDDLFKNGVHDFLVAETTKTHAIINQMSLGD
FDRNA
(SEQ ID NO: 655)
>SRR4754862_508403_7|P
[freshwater metagenome]
MSNFSDNVRTKEFKLILSSEQERVLEDWMLVCKWVWNRSLGLIEEFNEWNPYDKISKSNVPATPLQRYDRKLKQWVRIE
IPDWKMGIERVEKKRGFIHPVAIDENSPVIDSLDSKKSVLYGFLKMFGHQHHKDRIVTYLIRGEERKVNFTDCPAKFIQ
GVAHELSKAWEGFLAGRHSRPRFKTAKDKVMTLIHYNAKDLGVKDGKINIPKLGYIEVIGLDKRWYGCDFNPMKICKKA
SGWYMQLTASVPVKQAKKTGLCCGIDPGHQFVMALDNGHTIEAAQPLKRGLKRLRKMQQQLSRKYRMNGGKTKNWEKLN
NKIAKLHEKIARHRRSFNHWHSTNLINWFDVIFVEDYKPANVYRKAKAKAKLDTDGAPMVAANGTAIYEKNNQKRKRGS
NRTGNDVAIGQAIDLLETKGKEHGKLVIRVDNWGTTLCCAKCGHQEKKKLSQRTHKCSNCGYTVARDVNSGQNIKLKGL
AQMAINQGVELSDNFWYKFLIDKNSATPSGSKKATKKKPKKLDTVIIPDDLFKNGVHEFLIGETAKTRAIINEMSLGNF
DRNA
(SEQ ID NO: 656)
>SRR5468113_274154_3|M
[freshwater metagenome]
MNTITKVRKIEFKVTLDAQQRQVFEHHSRDLRFIWNTGLACIQWREWWEKWQQVLESPDRVGYEPETVPINWACNIVKS
PKKKKKDEESEKKVYALACDRVQYRLEKTTNLELGTGEWTEPRKDRNGKIDEDHCWVAYPCKPEPVREHWTEEPRLLLL
MKNPYMALRTMFAKKNWDPETVEGKIIHGLNTAWVAGECKALGDAWSSYKSGVRKRPRFKKRHDRSNLINPSSKQAKFS
GNSLTLPGLGRVTVKGLQQRWGEKPACPIALIKEGDEFYLQLTGELEIPVVRSNKVTIGIDPGSVRLATTDNGAVIEAH
KFGKQMTRRQKKLQASINRKLRLNSDRVYDESDSSRFYLKPRKNWKRKNLQKVRTKLQKLSAKTARQRRAYNHFHSTRI
VQSADVIIMEGLELKNVTRAVKKGKSGEHNKRKAKAGLNRSLLDNAIGQFYGMIEQKAKDAGKVTARVNPFRTSMTCNK
CGFSDAKNRKTQAGFHCQKCGHSDNADRNAALNIKRMGVLGVTKLTFDNDWNITVPGWIEPGDLVALHSKGLKPVGTAK
KRSKRAGKEHPSQLALEIGSQ
(SEQ ID NO: 657)
>SRR5468149_1084624_1|P
[freshwater metagenome]
MKTIKIKLSITPSQSQLIEGYFSELSWIWNKILASEVNNHATQWYKWAAKQSGKCWPAFSLDGANMTPLRFGKSAFIGA
ACQIAIGGAYWKRDDSINVAIKVKGKTEFRKGGKWMKGDRPYTPVPITDYQPRTFTDGTPLLKPADWDRVGKLNQLREA
DGLPPLSLPSDYIGGLVAHFDTAWKAWLDPKLKSRGKLKFKNPREGFVESLSNPQKPPSIDFENETIRIPGIGAIAVGD
RSWRDRIPSGGVPRTYTVNSKPSGWYINIVFANALQPSLKKMEKAAAAVKSQYGKESPEYLEARASVSAIASQISEAGF
VDRKPLSIGIDPGVNAIIGTDHGALFRPNLARERASVRVEYLSAKLATVKELNDKQWKDAGSKRPDTKNEIRLKYQIAR
THEKGANSSNAFNHKLSTRLVGTYTAIAWEDTQLTNLLKQATPKASEEGVGYEKNGAAAKRGLNWSLKQRCLGDLKAKT
KQKMGVLGGEFIDSPAPYSSRECSCCGAVGDRTEQHEFICKNELCEAYLIPKQADVNAARNHAKNAGFSISDVIHSADK
ILYSRPTRRRKKVILLADNRSLGGIDRKVLTRKAQVPGVKEKATTLIDAPELWGTIPKKA
(SEQ ID NO: 658)
>SRR5574091_1575611_4|M
[freshwater metagenome]
MENMTRVVKFRLTLTEEQQSLIDEKMRLLKYLWNLAVGLQEEVNQRRLRDKFEFKEFSPEFWETSYLSLYSSFPHIEKL
PKDKTKLLVGNPCCKIAYLKNKKEYVLLKLEERKKRPYLGNPDAKKHTTKPPDKEALKKYFYPDLADKIFEIGSEFRGC
FYRYVISKAFETAKKGIRGFPKYKGKLDSVQSLIVGHPTLIKIRDSGIFLNKQIGLLVIDDINRLSKESDVRMASIVRK
ASGYYLHLTINLPVPMHFPSDRQIGIDVGCVNLYTDSEGRHIETKAYYRNKERKIAHLQRKMARQEKGSANYLKSKEKL
ALLHEQIKDRRAGYLHQVSHKLTQKYSHIAMEDLKLKNMTKRAGVKENEDGTYAHNGASAKSGLNKSILDQGIGELKRQ
LIYKAEEKGGRVVLVNPKYTSQTCFNCGHKHKDNRKSQSEFICVSCGYSANADENAAKNILTLSLISSTIGVLRSSLLS
YPSLLGKAVSLLAYVCGSPKGTCEAERERSDPPINPPVKGGNCLDNFSTLTIKDPRHQSEKVSQPIDSVQLTIW
(SEQ ID NO: 659)
>SRR6475630_1852385_2|M
[freshwater metagenome]
MSNFSDNVRTKEFKLILSSEQERVLEDWMLVCKWVWNRSLGLIEEFNEWNPYDKISKSNVPATPLQRYDRKLKQWVRIE
IPDWKMGIERVEKKRGFIHPVAIDENSPVIDSLDSKKSVLYGFLKMFGHQHHKDRIVTYLIRGEERKVNFTDCPAKFIQ
GVAHELSKAWEGFLAGRHSRPRFKTAKDKVMTLIHYNAKDLGVKDGKINIPKLGYIEVIGLDKRWYGCDFNPMKICKKA
SGWYMQLTASVPVKQAKKTGLCCGIDPGHQFVMALDNGHTIEAAQPLKRGLKRLRKMQQQLSRKYRMNGGKTKNWEKLN
NKIAKLHEKIARHRRSFNHWHSTNLINWFDVIFVEDYKPANVYRKAKAKAKLDTDGAPMVAANGTAIYEKNNQKRKRGS
NRTGNDVAIGQAIDLLETKGKEHGKLVIRVDNWGTTLCCAKCGHQEKKKLSQRTHKCSNCGYTVARDVNSGQNIKLKGL
AQMAINQGVELSDNFWYKFLIDKNSATPSGSKKATKKKPKKSDTVIIPDDLFKNGVHEFLIGETAKTRAIINEMSLGNF
DRNA
(SEQ ID NO: 660)
>SRR6475633_3251865_1|M
[freshwater metagenome]
MERVEKKRGFIHPVAIDENSPVIDSLDSKKSVLYGFLKMFGHQHHKDRIVTYLIRGEERKVNFTDCPAKFIQGVAHELS
KAWEGFLAGRHSRPRFKTAKDKVMTLIHYNAKDLGVKDGKINIPKLGYIEVIGLDKRWYGCDFNPMKICKKASGWYMQL
TASVPVKQAKKTGLCCGIDPGHQFVMALDNGHTIEAAQPLKRLKRLRKMQQQLSGRKYRMNGGKTKNWEKLNNKIAKLH
EKIARHRRSFNHWHSTNLINWFDVIFVEDYKPANVYRKAKAKAKLDTDGAPMVAANGTAIYEKNNQKRKRGSNRTGNDV
AIGQAIDLLETKGKEHGKLVIRVDNWGTTLCCAKCGHQEKKKLSQRTHKCSNCGYTVARDVNSGQNIKLKGLAQMAINQ
GVELSDNFWYKFLIDKNSATPSGSKKATKKKPKKSDTVIIPDDLFKNGVHEFLIGETAKTRAIINEMSLGNFDRNA
(SEQ ID NO: 661)
>3300031784|Ga0315899_10084352_2|M
[fungi-freshwater]
MPKAKPTDKEKDKRPIKTLEFKLYPNQSQVLTLTDWLDRGRKVWNNGLAVLLEKDQQDWRKKVGFDPMDGNEAWQWFPN
QVGGKTVFGLCCAITFYNRRQNEHYPACFIRHPQNVDGAPRSLIYRATQLDNFCTRFKGGIGDDLLESWKAYKDKNRPT
AKLPKFKGKRFPLKSLSNGECTAKIVGKTAIKFPLLGNIRTKGLERVPQDSKICTARICRKASGWYLQLAIRWDWPVPN
VKMPDVAVAIDPGVRFATSTDYGRQVDAPQFMLKQTKKLRREQRKLSRRKLKGKNWQKQAAKIARLHEKVSRQRNAFWH
KESTYFVTSFGGVAIEDNNFNNMGRKAKAKPKEDGKGYERNNQAQKRGLNRSLKDVACSRLKVMVETKAKTINNEVHLV
RSHHNSQTCSECGHVAKDNRKSQSNFSCVNCGHSLNADINAAINIYNRADWSNRYNLHPRRLQVSDMERYPSFDGGIDA
SQKPATVHGKPSNGTRSQQEGESSPLSEITEKSRSHGLAKPVQLSLWDIVA
(SEQ ID NO: 662)
>3300031857|Ga0315909_10035026_2|M
[fungi-freshwater]
MENMTRVVKFRLTLTENQQSLIDEKMRLLKYLWNLAVGLQEEVNQRRLRDKFEFKEFSPEFWETSYLSLYSSFPHIEKL
PKDKIKLLAGNPCCKIAYLKNKKEYVLLKLEERKKRPYLGNPDAKKHTTKPPDKEDLKKYFYPDLADKIFEIGSEFRGC
FYRYVISKAFETAKKGIRGFPKYKGKLDSVQSLIVGHPTLIKVRDGGIFLNKQIGLLVIDDINRLPKESDVRMASIVRK
ASGYYLHLTINLPVPMHFPSDRQIGIDVGCVNLYTDSEGRHIETKAYYRNKERKIAHLQRKMARQEKGSANYLKSKEKL
ALLHEQIKDRRAGYLHQVSHKLTQKYSHIAMEDLKLKNMTKRAGVKENEDGTYAHNGASAKSGLNKSILDQGIGELKRQ
LIYKSQEKGGRVVLVNPKFTSQTCFNCGHKHKDNRADENAAKNILTLSLISSTIGVLRSSLLSYPSLLGKSQSEFICVS
CGYSANKAVSLLAYVCGSPKGTCEAERERSDPPINPPVKGGNCLDNFSTLTIKDPRHQSEKVSQPIDSVQLTIW
(SEQ ID NO: 663)
>3300032092|Ga0315905_10155087_1|P
[fungi-freshwater]
MSQENITRVVKFRLTLTENQQSLIDEKMRLLKYLWNLAVALQEEVNQRRLRDKFGFKEFSPEFWELSYLKLYSDFSHIE
KLPKDKTKLLVGNPCCKIAYLKNKKDYTPIKLEERKKRPYLGNPDAKKHTAKPPDKKDLKKYFYPDLADKIFEIGSEFR
GCFYRYVISKAFETAKKGIRGFPKYKGKLDSVESLIVGHPTLIKIRDGGIFLNKQIGLLVIDDINRLPKDSDVRMASIV
RKASGYYLHLTVNLPVPMHFPSDRQIGIDVGCVNLYTDSEGRHIETKAYYRNKERKIAHLQRKMARQEKGSANYLKSKE
KLALLHEQIKDRRAGYLHQVSHKLTQKYSHIAMEDLKLKNMTKRANVKENEDGTYAHNGASAKSGLNKSILDQGIGELK
RQLLYKSQEKGGQVVLVNPKFTSQTCFECGHKHKDNRKSQSEFICVSCGHSANADENAAKNILTLSLISSTIGVLRSSL
LSYPSLLGKAVSLLAYVCGSPKGTREAERERSDPPIDPPAKGGNCLDNFSTLTIKDPRHQSEKASQPIDSVQLTLF
(SEQ ID NO: 664)
>3300032092|Ga0315905_10155087_2|M
[fungi-freshwater]
MIQTNIEDKMSQENITRVVKFRLTLTENQQSLIDEKMRLLKYLWNLAVALQEEVNQRRLRDKFGFKEFSPEFWELSYLK
LYSDFSHIEKLPKDKTKLLVGNPCCKIAYLKNKKDYTPIKLEERKKRPYLGNPDAKKHTAKPPDKKDLKKYFYPDLADK
IFEIGSEFRGCFYRYVISKAFETAKKGIRGFPKYKGKLDSVESLIVGHPTLIKIRDGGIFLNKQIGLLVIDDINRLPKD
SDVRMASIVRKASGYYLHLTVNLPVPMHFPSDRQIGIDVGCVNLYTDSEGRHIETKAYYRNKERKIAHLQRKMARQEKG
SANYLKSKEKLALLHEQIKDRRAGYLHQVSHKLTQKYSHIAMEDLKLKNMTKRANVKENEDGTYAHNGASAKSGLNKSI
LDQGIGELKRQLLYKSQEKGGQVVLVNPKFTSQTCFECGHKHKDNRKSQSEFICVSCGHSANADENAAKNILTLSLISS
TIGVLRSSLLSYPSLLGKAVSLLAYVCGSPKGTREAERERSDPPIDPPAKGGNCLDNFSTLTIKDPRHQSEKASQPIDS
VQLTLF
(SEQ ID NO: 665)
>SRR6476078_1283286_3|P
[lake water metagenome]
MIFEPNVKVLEFKIHPTEEQVSKIDQSLAACKLLWNLSIALKEESKQRYYRKKHKFDEFSPEIWELSYSGHYDEKEFKS
LKDKEKKLLIGNPCCKIAYFKKTSNGKEYTPLDAIPIRRFMNAENIDKDAVNYLNRKKLAFYFRENTAKFIGEIETEFK
KGFFKSVIKPAYDAAKKGIRGIPRFKGRRDKVETLVNGQPGTIKIKSNGVIVSSKIGLLKVRGLDRLQGKAPRMAKITR
KATGYYLQLTVETDDTIYKESDKCVGLDMGAVAIFTDDLGRQSEAKRYAKIQKKRLDRLQRQASRQKDGSNNQRKTYAK
LARVHEKIARQRKGRNAQLAHKITSEYQSVILEDLKLKNMTAAAKPKEREDGDGYKQNGKKRKSGLNKALLEMSV
(SEQ ID NO: 666)
>SRR6476078_1283286_3|M
[lake water metagenome]
MKVLEFKIHPTEEQVSKIDQSLAACKLLWNLSIALKEESKQRYYRKKHKFDEFSPEIWELSYSGHYDEKEFKSLKDKEK
KLLIGNPCCKIAYFKKTSNGKEYTPLDAIPIRRFMNAENIDKDAVNYLNRKKLAFYFRENTAKFIGEIETEFKKGFFKS
VIKPAYDAAKKGIRGIPRFKGRRDKVETLVNGQPGTIKIKSNGVIVSSKIGLLKVRGLDRLQGKAPRMAKITRKATGYY
LQLTVETDDTIYKESDKCVGLDMGAVAIFTDDLGRQSEAKRYAKIQKKRLDRLQRQASRQKDGSNNQRKTYAKLARVHE
KIARQRKGRNAQLAHKITSEYQSVILEDLKLKNMTAAAKPKEREDGDGYKQNGKKRKSGLNKALLEMSV
(SEQ ID NO: 667)
>SRR7812565_865334_1|P
[lake water metagenome]
MKTIKIKIKLTTDQVQLCDRYLEELTWLWNLTLSNQLHNHCVTWYAWAAKLSADLDKATEKLDKLKPEQQQLIKDYYRT
KDKPKLSKKEQELVAKFDIFARWNSFSLDGIIPVPLRLGNSGYEGLSCQIATGGNYWKRDENINIPINTKKGIVHVKGY
KLVKGDKPWQRIEIVPHKYRTFPGGKFEGRELTTLEKLDNVNGLNTLRAFQNLPDLQVSSHYIGGLLAFFKESWSAFLD
PKRMNSRKPKFKKDSDKITTLSNNQCAPNRIDVNKNIVTVTGFSPIAIIDKNWVKRLNLSEVLPRTYMLTQNPSGYYIN
IVIAHPLHEEKTALVKKLPKVKKEFGEDSQEYEDIKSKIKFLEQQIKEASIVKGKDLSVGIDPGVQAVVSTDHGALFLP
NLTRERVSIHIEELQSRLDNIELINDKKWKSLGNKTPRIKTKNETKLQEKISRLHERGANSSNAFNHKLSTRLSRTYEH
IAWEDTQINNLLKQVEPKALPEGIGYAHNGASAKRGLNWIMRQRCLSDLKAKTKQKTENRGGNFHEPPANYSSQTCHCC
KQKGERRSQHEFICKNSDCKLFDISQQADTNAARNHKQNGGFDLGDVKYHNVKLVYQKPKRFKKKRLTNQ
(SEQ ID NO: 668)
>SRR6448207_482583_3|P
[microbial mat metagenome]
MKTIKIKLSITPNQSQLIESYFSELSWIWNKILASELSNHATQWYKWAAKQSGKGWPVFSLDGANMTPLRFGKSAFIG
AACQIAIGGAYWKRDDSINVAIKVKGKIEFRKGGKWMKGDRPYTPVPITDYQPRTFTDGTPLLKPADWDRVGKLNQLR
ETDGLPPLSLPSAYIGGLVAHFDAAWKAWLDPKLKSRGKLKFKNPENGFVASLFDRYPPTCIDLENETIRIPGIGAIA
VGDRSWKDRIPSGGVPRTYTVNSKPSGWYINIVFANALQPSLKKMEKAAAAVKSQYGKESPEYLEARASVNAIAFQIS
EDGFVDRKPLSIGIDPGVNAIIGTDHGALFRPNLARERASVRVEYLSAKLDAIKELNDKQWKDAGSKRPDTKNEIKLK
YQIARTHEKGANSSNAFNHKLSTRLVGTYTAIAWEDTQLTNLLKQATPKASEEGVGYEKNGAASKRGLNWSLRQRCLG
DLKAKTKQKMGVLGGEFIDSPAPYSSRECSCCGAVGDRTEQHEFICKNELCTAYLIPKQADVNAARNHAKNAGFSISD
VIHSADKLIYSRPTRRRKKVVSLADNRSLGGIDRKVLTRKAQAPGVKEKATTLIDAPELWGTIPKKA
(SEQ ID NO: 669)
>SRR7244345_343276_44|P
[microbial mat metagenome]
MLTLEFKLSLTTCQEQRLEAWLRDMNWIHNSALACIESFNAHNAYNKEDKRSYACNPVVSYWRGQVYPSCPVGHQLTQF
DEESYAAALLERKNKKGTVYPLQAWAGEPRLENVSYFSLLNRFPKKLHPIKLADVPQKFVAGRVERVALSWQAFLKGNA
KPPKFKSRRNPVTSLIHNESKKIRIDGDRINMPRIGWLKAKGLAKRWPQGVPFCPMKVIKAADGWYLQLTGEVEERKSP
KLTGRHVGIDPGSVRHHTTDSGSFVEPPRYLMKAAVKLRTLQRQLSRQYRQNSTQIFGKDGRVIRSVARSDWDRKNFDK
TKAKIAKLHAKIARQRRAFNHFQSSKYVTMFDVITVEDFEPAKLTRAVKKGEAGVRNGRKAKSGLNRNLLDNAIGQFYG
MLEQKSKDRGRAFQRVKPAFSSRTCNCCGYRSKDNRKSQSSFVCLSCGHRDNADRNAARNIKRMAELGIDRLTFTDDFA
DGFREQVGVDGAKDVVSLPKKAKKRGSRKSTMEVSCQLTLDEGSSNSL
(SEQ ID NO: 670)
>WP_016456110.1
[Propionimicrobium lymphophilum ACS-093-V-SCH5]
MSYLCARGRFNLSGFSTGSMGVLPVRASLFALLFTTLHGARISAHWYGMSKENDHTVTCIKICLEPNKAQRAQFASFAG
SARWAYNFALAIKIGYQKRWFEARKQFIESGLDEKAAGKKASEQVGRMPNYMSIATNEWTQLRDEVCPWYPEVPRRVFV
GGFQRADAAFKNWFDSKSGRRSGAAMGWPKFKSKSKSRESFVIANDVQPAFVANLNRYIKTGELADMDYRHIKVPKCGE
VRLTPGSAGQLRQLGRTMLAEAKTGELITRITSGTISRLGDRWYVSLVISGPFVPDAISTKRQRRNGVVGVDLGSGRFY
ATTSEGLSIINPKFVSKYEQELARANRALAKTAKGSAARKKALARLRRVHARSALARDGFSHQVSAWLTSQFAGVAVEK
FDLASMLASAKGTVEKPGKNVDVKARFNAHLADVGIASTIDKLLYKGKRDGCRVQVVNTLDNSSTTCAKCGHTCVCGPE
QKTFTCPDCGYNAPRQLNSAQYIRQLATVGFDELGLDMTASLTPDTGKRPIAFMTSAH
(SEQ ID NO: 671)
>AGZR01000008_18|M
[Propionimicrobium lymphophilum ACS-093-V-SCH5]
MGVLPVRASLFALLFTTLHGARISAHWYGMSKENDHTVTCIKICLEPNKAQRAQFASFAGSARWAYNFALAIKIGYQKR
WFEARKQFIESGLDEKAAGKKASEQVGRMPNYMSIATNEWTQLRDEVCPWYPEVPRRVFVGGFQRADAAFKNWFDSKSG
RRSGAAMGWPKFKSKSKSRESFVIANDVQPAFVANLNRYIKTGELADMDYRHIKVPKCGEVRLTPGSAGQLRQLGRTML
AEAKTGELITRITSGTISRLGDRWYVSLVISGPFVPDAISTKRQRRNGVVGVDLGSGRFYATTSEGLSIINPKFVSKYE
QELARANRALAKTAKGSAARKKALARLRRVHARSALARDGFSHQVSAWLTSQFAGVAVEKFDLASMLASAKGTVEKPGK
NVDVKARFNAHLADVGIASTIDKLLYKGKRDGCRVQVVNTLDNSSTTCAKCGHTCVCGPEQKTFTCPDCGYNAPRQLNS
AQYIRQLATVGFDELGLDMTASLTPDTGKRPIAFMTSAH
(SEQ ID NO: 672)
>SRR8162779_1368970_53|P
[sediment metagenome]
MLTLEFKLSLTISQEQRLEAWLRDMSWVHNSALACIESFNAHNAYHKGDKRSYACNPVVSYWRGQVYPSCPVSHQLTQF
DEESYAAALRERKNKKGTVYPLQAWAGEPVFGQISPFSLQARFGINRHPLKLKAVGIPKVFVAGRTNIVAKSWDAFCNR
ASKPPKFKSRRNPVQSLISINSQATSIEGDRIRIPNLGFAKAKGLSKRWPTGAVVSTLKIIKAADGWYLQLTGEVGERK
PPKLTGRHVGIDPGAVRHHTTDSGSFVEPPRYLLKAAQKLRMLQRQLSRQYRQNSTQIFGKDGRVIRSVARSDWDRKNF
DKTKAKIAKLHAKIARQRRAFNHFQSSKYAAMFDVITVEDFEPAKLTRAVKKGEAGVRNGRKAKSGLNRNLLDNAIGQF
YGMLEQKSKDRGRLFQRVKPAFSSQTCNCCGYRSKDNRQSQSSFVCLCGHRDNADRNAARNIKRMAESLGIDRLTFTDD
FADGFRERVGVDGAKDVVSLPKKAKKRGSRKSTMEVPCQLTLDEGMFK
(SEQ ID NO: 673)
>SRR5855413_300079_4|M
[soil crust metagenome]
MKTLEFKLYLTRSQQETIDNWLSALKYPWNKGVELIHTFNDFNYYDKRFKTLAPCCPIASYNHKLRIVNAKNREKKQQL
RENEYLSCPIGWKLDDYTGFSTSLETRELMQVLVDEGKTLEKVGTRSPYGIYPIRPFASGKLVTNLSYFELLSVFAHKR
NVDRPWFIDADEPWFTDVDSKIIAGMVKTLADSWQAFLDGKRKPPKFKGKNKRIDTLINNNSKDIRVEGDRIKLPKIGF
VRAKGLAKRWNQGLVFCPMKICRKASGYYLQLTGEVPPEPLKKHPKLKAVGLDPGIAAVYTDDAGRTVKVPPYLEKDLG
KLKSLQRKVQRQWENNKDIPEWERKNWQKTQNKIAKLHEKIARRGRAFNHFESTKLVRQFEEIYLEDYRPSEMVGKVKP
IDSGKVVVNTKDELTTVYEKNGRGVNKLINRATLRNRVGQLWQMIETKGGKRVLRVERNGTSSECPKCGDIKEKLIQQR
IHRCGECGYITHRDRAAAQIIKQRGLEIRQAGGDEDNGKKQRQRRDRKKG
(SEQ ID NO: 674)
>SRR5855413_1311040_12|M
[soil crust metagenome]
MKTLEFKLYLTDSQQQIVDEWLAALKFVWNKGVELMEDFKAFNHYDKRFKATAPCCPIVSYERKLRQVLPTCPVGWRLD
DYSGLYHTKNEQGEWELVQVVMDEDKLLDKLVEKRSPNGIFPMRPWRNGKMLTGITHYGLEPIFAHKRNTDKPWLTAVD
SKFISGMVKSLADGWTAFLGGSRDRPPKFKNKSVRINTLIHNNTKPDKSGRAVAPISGDRIRIPKIGWVRVKGLSKRWP
KGLEFCPLKICRKASGYYLQLTGDVKNDILIKPPSVQAIGLDPGIEAVFTDDVGRRIKVPDYLERDLKKLKQLQRKASR
QWEANKECEEWHRKNWRKTQDKIAKLHEKIARRGRAFNHFQSTKLVRIFNEIYLEDYRPSEMVGKVEPVDSGKLVINKN
EDLTTVYEKNGREVNRAINRATLRNRVGQLWQMIETKGGKRVLRVERDGTSSECPRCGYVKQKRIQERTHRCEQCGYKA
HRDQAAAEVIKKKGQEARLKGCVEQENTKQRRKGRGKKVSGE
(SEQ ID NO: 675)
>SRR5855415_346708_l05|P
[soil crust metagenome]
MIDRQGRQQCRLKLMKTIEFKLSLTRSQEEILNQWMSALKFVWNLGVALIKEFNSFNHYDKRFKQSAPCCPIVAYNHKL
RVTNGATQEGWRECEFPIQPIGFQLLAFDEENPIDVGKRTPCGVYPVIVNGHAVKNLTYFGIQGAFAHKRNQDKPWLTC
IPSKFVHGTVQSLADSWQAFLSGNSKRPKFKGKNDQIKTLVTNNAKDITTIKGDRIRIPNLGYVRAKGLSKRWHEGVPI
CSLKICKKASGYYLQLTGDIEACSPKKTKIPKVQAVGLDPGIEHVYCDDAGRKVKVPQYLERDLQKLKQLQRKAQKQWD
MNKDTVDQNGEPWQKKNWRRTQDKIAKLHERIARRGRAFNHFQSTKLVRQFQQIYLEDYKPSEVIKKVAPVDSGKMVVN
KNDELTTIYEKNERFLNRSTNRAAQRNRVGQLWTMIKTKGGKKVVLVEAAGTSDECPSCGHVEEKTLRQRLHRCKNCGF
VAHRDVAAAKIIKKRGMAQSPQMDVSLR
(SEQ ID NO: 676)
>SRR5855420_1331858_67|P
[soil crust metagenome]
MYLTDSQQQ1VDEWLAALKFVWNKGVELMEDFKAFNHYDKRFKATAPCCPIVSYERKLRQVLPTCPVGWRLDDYSGLYH
TKNEQGEWELVQVVMDEDKLLDKLVEKRSPNGIFPMRPWRNGKMLTGITHYGLEPIFAHKRNTDKPWLTAVDSKFISGM
VKSLADGWTAFLGGSRDRPPKFKNKSVRINTLIHNNTKPDKSGRAVAPISGDRIRIPKIGWVRVKGLSKRWPKGLEFCP
LKICRKASGYYLQLTGDVKNDILIKPPSVQAIGLDPGIEAVFTDDVGRRIKVPDYLERDLKKLKQLQRKASRQWEANKE
CEEWHRKNWRKTQDKIAKLHEKIARRGRAFNHFQSTKLVRIFNEIYLEDYRPSEMVGKVEPVDSGKLVINKNEDLTTVY
EKNGREVNRAINRATLRNRVGQLWQMIETKGGKRVLRVERDGTSSECPRCGYVKQKRIQERTHRCEQCGYKAHRDQAAA
EVIKKKGQEARLKGCVEQENTKQRRKGRGKKVSGE
(SEQ ID NO: 677)
>SRR5855420_1331858_68|M
[soil crust metagenome]
MKTLEFKLYLTDSQQQIVDEWLAALKFVWNKGVELMEDFKAFNHYDKRFKATAPCCPIVSYERKLRQVLPTCPVGWRLD
DYSGLYHTKNEQGEWELVQVVMDEDKLLDKLVEKRSPNGIFPMRPWRNGKMLTGITHYGLEPIFAHKRNTDKPWLTAVD
SKFISGMVKSLADGWTAFLGGSRDRPPKFKNKSVRINTLIHNNTKPDKSGRAVAPISGDRIRIPKIGWVRVKGLSKRWP
KGLEFCPLKICRKASGYYLQLTGDVKNDILIKPPSVQAIGLDPGIEAVFTDDVGRRIKVPDYLERDLKKLKQLQRKASR
QWEANKECEEWHRKNWRKTQDKIAKLHEKIARRGRAFNHFQSTKLVRIFNEIYLEDYRPSEMVGKVEPVDSGKLVINKN
EDLTTVYEKNGREVNRAINRATLRNRVGQLWQMIETKGGKRVLRVERDGTSSECPRCGYVKQKRIQERTHRCEQCGYKA
HRDQAAAEVIKKKGQEARLKGCVEQENTKQRRKGRGKKVSGE
(SEQ ID NO: 678)
>SRR5855435_639752_6|P
[soil crust metagenome]
MKTLEFKLYLTRSQQETIDNWLSALKYPWNKGVELIHTFNDFNYYDKRFKTLAPCCPIASYNHKLRIVNAKNREKKQQL
RENEYLSCPIGWKLDDYTGFSTSLETRELMQVLVDEGKTLEKVGTRSPYGIYPIRPFASGKLVTNLSYFELLSVFAHKR
NVDRPWFIDADEPWFTDVDSKIIAGMVKTLADSWQAFLDGKRKPPKFKGKNKRIDTLINNNSKDIRVEGDRIKLPKIGF
VRAKGLAKRWNQGLVFCPMKICRKASGYYLQLTGEVPPEPLKKHPKLKAVGLDPGIAAVYTDDAGRTVKVPPYLEKDLG
KLKSLQRKVQRQWENNKDIPEWERKNWQKTQNKIAKLHEKIARRGRAFNHFESTKLVRQFEEIYLEDYRPSEMVGKVKP
IDSGKVVVNTKDELTTVYEKNGRGVNKLINRATLRNRVGQLWQMIETKGGKRVLRVERNGTSSECPKCGDIKEKLIQQR
IHRCGECGYITHRDRAAAQIIKQRGLEIRQAGGDEDNGKKQRQRRDRKKG
(SEQ ID NO: 679)
>SRR6201738_878635_2|M
[soil metagenome]
MDKSKRQGEVAEKQLRESLPQKRSIRGAFLFDKMKACQAEAQRIVKMLTLEFSVEFTPEQESIISQWMDLQKIQWNIGL
SALLEFDATRRWNKLTDSDGGKGAYYPVCAIAGGDWVPASAWGYEAIPRNDGQEPLKGWTARACPLYKVGVGDRWLSGG
CTIPEIGAMVPNVEPLLLSIKDAKSPGGLSIMARADNIPSDLAETPSLFRHGTLALLFASWDRHKSDPLNAGQPKRKRY
QDKWDVLYTGNAKELSKTSDAVRIPKIGWVGIPKLSDRWRDSEGNAPDICSFKIVRRDRKFRVQLTGDLKRSYKAQPSN
LSVGVDLGFVYAHIESNGNRSALLDLSLEKLEQRKQRLQAKLDSKLDQRIVLWLRNPETTHASLIVRRKTRRGIEEEKP
MIRISLENWEKLKQCRTAGEAAQIIGQKRDKRYQTLRHALPKSAKEQALRVQIASIDRKIAATRKTRDAKLATRLAKKY
GHIAIENGLQREVKRHRPDPKKQGDKYLKNGAERQSETNKQLKALAPGRKIAMLEAMSKRYGRDFSKQESPTTTTECPC
CGRHNEPSLKMDEHGDRRYSCACGWEIDQDVNAATNIELRSSALKPEVQLSQPAETARIRSYQLEADGKLFAEPQWRMP
PAPPKAKKESRGKRRKALRDSEPLKELKGQRLTAASRKSQVKALESGVSKMLP
(SEQ ID NO: 680)
>SRR6201739_286584_1|P
[soil metagenome]
MDKSKRQGEVAEKQLRESLPQKRSIRGAFLFDKMKACQAEAQRIVKMLTLEFSVEFTPEQESIISQWMDLQKIQWNIGL
SALLEFDATRRWNKLTDSDGGKGAYYPVCAIAGGDWVPASAWGYEAIPRNDGQEPLKGWTARACPLYKVGVGDRWLSGG
CTIPEIGAMVPNVEPLLLSIKDAKSPGGLSIMARADNIPSDLAETPSLFRHGTLALLFASWDRHKSDPLNAGQPKRKRY
QDKWDVLYTGNAKELSKTSDAVRIPKIGWVGIPKLSDRWRDSEGNAPDICSFKIVRRDRKFRVQLTGDLKRSYKAQPSN
LSVGVDLGFVYAHIESNGNRSALLDLSLEKLEQRKQRLQAKLDSKLDQRIVLWLRNPETTHASLIVRRKTRRGIEEEKP
MIRISLENWEKLKQCRTAGEAAQIIGQKRDKRYQTLRHALPKSAKEQALRVQIASIDRKIAATRKTRDAKLATRLAKKY
GHIAIENGLQREVKRHRPDPKKQGDKYLKNGAERQSETNKQLKALAPGRKIAMLEAMSKRYGRDFYKQESPTTTTECPC
CGRHNEPSLKMDEHGDRRYSCACGWEIDQDVNAATNIELRSSALKPEVQLSQPAETARIRSYQLEADGKLFAEPQWHMP
PAPPKAKKESRGKRRKALRDSEPLKELKGQRLTAASRKSQVKALESGVSKMLP
(SEQ ID NO: 681)
>GCL37732.1
[Sphaerospermopsis reniformis]
MKTIKIKVSLSTQQKEIFNQYIDQLEWFWNLALANQFHNHCIKWYEWAKKQQQLLDKTKENFDKLKPEQKQLVLDFYSH
KYGEKQPKLTEKQKDLINKFEIFSRWLPFDLDGIIPVPLLLGNSGYEGLSCRIAIGGPRWVRDENINIPLKNKKGEIIH
KKGSKLVPGKHPYQPIKPTPHSYKTFPGGKFAGRELVDVKKLDNLDGLNSIRSAENLPPLTVPTDYIGGTMKFFEVSWN
AFLDPKLPERRKVKFKDKERKLTTLSNNQKPPNRINPEKNTVSISGIGEVKVIDRNWLQRLNLENISPRTYTLSKKPSG
YYLNIVVAHPLQEEKSKLDKQLPKVKKEYGEESQEYQEILSKYNEVSEQIKSSYFDDVKDLSVGIDPGVNAVISTDHGA
LFMPNITRERISIHIEELQSKLNKIKDINDAQWKAAGNKGERPKTKNEIKLQAQISRLHEKGANSANCFNHKLSTRIAR
TYRYVCWEDTKIKNLLKQVEPQALPEGVGYAHNGASAKRGLNWIMRQRCLSDLEAKTKEKVEKKGGKFNEPSANYSSQL
CHCCQQKGERVSQHEFICKNPECSLFEKVQQADVNAARNHKQHGGFEVGEVKYNLTKLQYQKPKRFKKKKLTK
(SEQ ID NO: 682)

TABLE 3010
Nucleotide Sequences of Representative CLUST.057059 Direct
Repeats and Spacer Lengths

| CLUST.057059 Effector | | Spacer |
|---|---|---|
| Protein Accession | Direct Repeat Nucleotide Sequence | Length(s) |
| 3300023179\|Ga0214923_10000634_6\|0P | CTTGCAACTGGGCTTGGGGACTGAGGATAGTTGAAAC | 32- |
| (SEQ ID NO: 601) | (SEQ ID NO: 683) | 39 |
| | GTTTCAACTATCCTCAGTCCCCAAGCCCAGTTGCAAG | |
| | (SEQ ID NO: 751) | |
| ATW59329.1 | GTTAGGATGCCCGCAGGATGTCATATAGTTGGCAAG | 26- |
| (SEQ ID NO: 602) | (SEQ ID NO: 684) | 45 |
| | CTTGCCAACTATATGACATCCTGCGGGCATCCTAAC | |
| | (SEQ ID NO: 752) | |
| SRR3727507_43825_27\|P | ATTGCAATAAATTTTAATTCTTAGCAGGGATTGAAAG | 34- |
| (SEQ ID NO: 603) | (SEQ ID NO: 685) | 37 |
| | CTTTCAATCCCTGCTAAGAATTAAAATTTATTGCAAT | |
| | (SEQ ID NO: 753) | |
| SRR3727511_164637_6\|M | ATTGCAATAAATTTTAATTCTTAGCAGGGATTGAAAG | 34- |
| (SEQ ID NO: 604) | (SEQ ID NO: 685) | 36 |
| | CTTTCAATCCCTGCTAAGAATTAAAATTTATTGCAAT | |
| | (SEQ ID NO: 753) | |
| SRR3727516_4364_11\|P | ATTGCAATAAATTTTAATTCTTAGCAGGGATTGAAAG | 34- |
| (SEQ ID NO: 605) | (SEQ ID NO: 685) | 36 |
| | CTTTCAATCCCTGCTAAGAATTAAAATTTATTGCAAT | |
| | (SEQ ID NO: 753) | |
| SRR3727519_259012_1\|M | TGCAATAAATTTTAATTCTTAGCAGGGATTGAAAG | 36- |
| (SEQ ID NO: 606) | (SEQ ID NO: 686) | 39 |
| | CTTTCAATCCCTGCTAAGAATTAAAATTTATTGCA | |
| | (SEQ ID NO: 754) | |
| SRR3727519_13189_1\|M | ATTGCAATAAATTTTAATTCTTAGCAGGGATTGAAAG | 34- |
| (SEQ ID NO: 607) | (SEQ ID NO: 685) | 36 |
| | CTTTCAATCCCTGCTAAGAATTAAAATTTATTGCAAT | |
| | (SEQ ID NO: 753) | |
| SRR5216639_261560_2\|P | CTTGAAATTCCTTTTAATGCCTATCAGGAATTGAAAC | 30- |
| (SEQ ID NO: 608) | (SEQ ID NO: 687) | 49 |
| | GTTTCAATTCCTGATAGGCATTAAAAGGAATTTCAAG | |
| | (SEQ ID NO: 755) | |
| SRR5216639_20646\|03_3\|P | GTTCCCAATAGGGGGACTTCTCGATCCAATAGAAAG | 24- |
| (SEQ ID NO: 609) | (SEQ ID NO: 688) | 38 |
| | CTTTCTATTGGATCGAGAAGTCCCCCTATTGGGAAC | |
| | (SEQ ID NO: 756) | |
| SRR5216639_2018995_2\|M | GTTGCCAAGAGGGCGACTTCTAAGGTTGATGGGAAG | 34- |
| (SEQ ID NO: 610) | (SEQ ID NO: 689) | 44 |
| | CTTCCCATCAACCTTAGAAGTCGCCCTCTTGGCAAC | |
| | (SEQ ID NO: 757) | |
| SRR5216639_409921_41\|M | CTTGCAAGAAGGGCGGAGGGATGAGAGGTGTTGAAAC | 31- |
| (SEQ ID NO: 611) | (SEQ ID NO: 690) | 45 |
| | GTTTCAACACCTCTCATCCCTCCGCCCTTCTTGCAAG | |
| | (SEQ ID NO: 758) | |
| SRR5216639_409921_40\|P | CTTGCAAGAAGGGCGGAGGGATGAGAGGTGTTGAAAC | 31- |
| (SEQ ID NO: 612) | (SEQ ID NO: 690) | 45 |
| | GTTTCAACACCTCTCATCCCTCCGCCCTTCTTGCAAG | |
| | (SEQ ID NO: 758) | |
| SRR8571171_1127661_43\|P | CTTGCAAGAAGGGCGGAGGGACAGGAGGGACTGAAAC | 34- |
| (SEQ ID NO: 613) | (SEQ ID NO: 691) | 44 |
| | GTTTCAGTCCCTCCTGTCCCTCCGCCCTTCTTGCAAG | |
| | (SEQ ID NO: 759) | |
| 3300002370\|release\| | CGCAATAGACGATTGCCTATTTTATGGATTGAAAC | 38 |
| scaffold29556_3\|P | (SEQ ID NO: 692) | |
| (SEQ ID NO: 614) | GTTTCAATCCATAAAATAGGCAATCGTCTATTGCG | |
| | (SEQ ID NO: 760) | |
| 33000023821017448\| | CTTGCAACTAAGACTGGGGACTGAGGATAGTTGAAAC | 32- |
| scaffold9922858_2\| | T (SEQ ID NO: 693) | 48 |
| M (SEQ ID NO: 615) | AGTTTCAACTATCCTCAGTCCCCAGTCTTAGTTGCAA | |
| | G (SEQ ID NO: 761) | |
| 3300002396\|B570J29629_1000007_3\|P | CGCAATAGACGATTGCCTATTTTATGGATTGAAAC | 38 |
| (SEQ ID NO: 616) | (SEQ ID NO: 692) | |
| | GTTTCAATCCATAAAATAGGCAATCGTCTATTGCG | |
| | (SEQ ID NO: 760) | |
| 3300002396\|B570J29629_1000558_1\|M | CTTGCAACTAAGACTGGGGACTGAGGATAGTTGAAAC | 34- |
| (SEQ ID NO: 617) | (SEQ ID NO: 694) | 50 |
| | GTTTCAACTATCCTCAGTCCCCAGTCTTAGTTGCAAG | |
| | (SEQ ID NO: 762) | |
| 3300002408\|1017274\| | CGCAATAGACGATTGCCTATTTTATGGATTGAAAC | 36- |
| scaffold00152_5\|M | (SEQ ID NO: 692) | 38 |
| (SEQ ID NO: 618) | GTTTCAATCCATAAAATAGGCAATCGTCTATTGCG | |
| | (SEQ ID NO: 760) | |
| 3300013005\|Ga0164292_10021448_2\|P | GTTCCAATTAATCTTAAGTCCTATTAGGGATTGAAAC | 34- |
| (SEQ ID NO: 619) | (SEQ ID NO: 695) | 43 |
| | GTTTCAATCCCTAATAGGACTTAAGATTAATTGGAAC | |
| | (SEQ ID NO: 763) | |
| 3300027808\|Ga0209354_10002575_5\|M | CCAACAGATGGCTAGAGTTGTCTAGGCAGTTGAAGG | 36- |
| (SEQ ID NO: 620) | (SEQ ID NO: 696) | 43 |
| | CCTTCAACTGCCTAGACAACTCTAGCCATCTGTTGG | |
| | (SEQ ID NO: 764) | |
| 3300020048\|Ga0207193_1000230_60\|P | CCCGCAATAGACGATTGCCTATTTTATGGATTGAAAC | 34- |
| (SEQ ID NO: 621) | (SEQ ID NO: 697) | 41 |
| | GTTTCAATCCATAAAATAGGCAATCGTCTATTGCGGG | |
| | (SEQ ID NO: 765) | |
| 3300015360\|Ga0163144_10269315_2\|M | CTTGCAATAAACTTTAATCCTTAGTAGGGATTGAAAC | 33- |
| (SEQ ID NO: 622) | (SEQ ID NO: 698) | 38 |
| | GTTTCAATCCCTACTAAGGATTAAAGTTTATTGCAAG | |
| | (SEQ ID NO: 766) | |
| 3300022561\|Ga0212090_10036221_2\|M | TTTCAATCCCTACCAAGGGTT | 26- |
| (SEQ ID NO: 623) | (SEQ ID NO: 699) | 43 |
| | AACCCTTGGTAGGGATTGAAA | |
| | (SEQ ID NO: 767) | |
| 3300005805\|Ga0079957_1000538_44\|M | ATTGCAATATATTTTGATCCTTGGTAGGGATTGAAAG | 23- |
| (SEQ ID NO: 624) | (SEQ ID NO: 700) | 36 |
| | CTTTCAATCCCTACCAAGGATCAAAATATATTGCAAT | |
| | (SEQ ID NO: 768) | |
| 3300005805\|Ga0079957_1019747_2\|M | CTTGCAACTGGGCTTAGGGACTGAGGATAGTTGAAAC | 33- |
| (SEQ ID NO: 625) | (SEQ ID NO: 701) | 42 |
| | GTTTCAACTATCCTCAGTCCCTAAGCCCAGTTGCAAG | |
| | (SEQ ID NO: 769) | |
| 3300001043\|JGI12316J14372_10004500_ | ATGACATCTGGGGGTTGGAAGGGGTTGCAAG | 18- |
| 6\|M | (SEQ ID NO: 702) | 44 |
| (SEQ ID NO: 626) | CTTGCAACCCCTTCCAACCCCCAGATGTCAT | |
| | (SEQ ID NO: 770) | |
| 3300001043JGI12316J15309_10000277_ | ATGACATCTGGGGGTTGGAAGGGGTTGCAAG | 42- |
| 14\|M | (SEQ ID NO: 702) | 44 |
| (SEQ ID NO: 627) | CTTGCAACCCCTTCCAACCCCCAGATGTCAT | |
| | (SEQ ID NO: 770) | |
| 3300001341\|1010336\|scaffold_14_ | ATGACATCTGGGGGTTGGAAGGGGTTGCAAG | 42- |
| 1570\|P | (SEQ ID NO: 702) | 44 |
| (SEQ ID NO: 628) | CTTGCAACCCCTTCCAACCCCCAGATGTCAT | |
| | (SEQ ID NO: 770) | |
| 3300027607\|Ga0207422_1002635_7\|P | ATGACATCTGGGGGTTGGAAGGGGTTGCAAG | 42- |
| (SEQ ID NO: 629) | (SEQ ID NO: 702) | 44 |
| | CTTGCAACCCCTTCCAACCCCCAGATGTCAT | |
| | (SEQ ID NO: 770) | |
| 3300007960\|1Ga0099850_1030516_1\|P | GTTGCCAAGAGGGTGACTAATTGGGTTAAG | 26- |
| (SEQ ID NO: 630) | (SEQ ID NO: 703) | 38 |
| | CTTAACCCAATTAGTCACCCTCTTGGCAAC | |
| | (SEQ ID NO: 771) | |
| 3300028735\|Ga0272446_1017865_2\|M | CTGATAAAGTTTTTGGGTACT | 49- |
| (SEQ ID NO: 631) | (SEQ ID NO: 704) | 58 |
| | AGTACCCAAAAACTTTATCAG | |
| | (SEQ ID NO: 772) | |
| SRR6869054_1535443_5\|P | GTCACCATGACATCTGGAGGTTGGCAGGGGTTGCAAG | 35- |
| (SEQ ID NO: 632) | (SEQ ID NO: 705) | 38 |
| | CTTGCAACCCCTGCCAACCTCCAGATGTCATGGTGAC | |
| | (SEQ ID NO: 773) | |
| SRR6869054_457352_2\|P | GCTGAAACCAAACTAATCCGCTCTTAGGGATTGAAAG | 34- |
| (SEQ ID NO: 633) | (SEQ ID NO: 706) | 37 |
| | CTTTCAATCCCTAAGAGCGGATTAGTTTGGTTTCAGC | |
| | (SEQ ID NO: 774) | |
| SRR6869055_1317318_5\|P | GTCACCATGACATCTGGAGGTTGGCAGGGGTTGCAAG | 35- |
| (SEQ ID NO: 634) | (SEQ ID NO: 705) | 38 |
| | CTTGCAACCCCTGCCAACCTCCAGATGTCATGGTGAC | |
| | (SEQ ID NO: 773) | |
| SRR3137750_862387_23\|M | CGATCAAAGGACTAATCCCGGCGATCGGGACTGAAAC | 35- |
| (SEQ ID NO: 635) | T (SEQ ID NO: 707) | 48 |
| | AGTTTCAGTCCCGATCGCCGGGATTAGTCCTTTGATC | |
| | G (SEQ ID NO: 775) | |
| SRR3138838_558748_1\|P | CCGACAAACGACTAGAGTTGTCTAGGCAGTTGAAGG | 37- |
| (SEQ ID NO: 636) | (SEQ ID NO: 708) | 38 |
| | CCTTCAACTGCCTAGACAACTCTAGTCGTTTGTCGG | |
| | (SEQ ID NO: 776) | |
| SRR3139299_296800_1\|M | CTCGCAATAGACGATTGCCTATTTTATGGATTGAAAC | 34- |
| (SEQ ID NO: 637) | (SEQ ID NO: 709) | 40 |
| | GTTTCAATCCATAAAATAGGCAATCGTCTATTGCGAG | |
| | (SEQ ID NO: 777) | |
| SRR3139690_493772_1\|M | GTCGCAATCTGGCTGGAT (SEQ ID NO: 710) | 53 |
| (SEQ ID NO: 638) | ATCCAGCCAGATTGCGAC (SEQ ID NO: 778) | |
| SRR3139690_185157_1\|M | CTTTCAAGTTAACTCTGTAGAGACGGTTTGAAAG | 35- |
| (SEQ ID NO: 639) | (SEQ ID NO: 711) | 43 |
| | CTTTCAAACCGTCTCTACAGAGTTAACTTGAAAG | |
| | (SEQ ID NO: 779) | |
| SRR3139690_493772_1\|P | GTCGCAATCTGGCTGGAT (SEQ ID NO: 710) | 53 |
| (SEQ ID NO: 640) | ATCCAGCCAGATTGCGAC (SEQ ID NO: 778) | |
| WP_015957291.1 | GTTTCTTATTAATGAATCCTAGCAATGGGATTGAAAC | 33- |
| (SEQ ID NO: 641) | (SEQ ID NO: 712) | 37 |
| | GTTTCAATCCCATTGCTAGGATTCATTAATAAGAAAC | |
| | (SEQ ID NO: 780) | |
| CP001287_4134\|P | GTTTCTTATTAATGAATCCTAGCAATGGGATTGAAAC | 33- |
| (SEQ ID NO: 642) | (SEQ ID NO: 712) | 37 |
| | GTTTCAATCCCATTGCTAGGATTCATTAATAAGAAAC | |
| | (SEQ ID NO: 780) | |
| WP_015785111.1 | GTTTCTTATTAATGAATCCTAGCAATGGGATTGAAAC | 34- |
| (SEQ ID NO: 643) | (SEQ ID NO: 712) | 37 |
| | GTTTCAATCCCATTGCTAGGATTCATTAATAAGAAAC | |
| | (SEQ ID NO: 780) | |
| NC_013161_4122\|P | GTTTCTTATTAATGAATCCTAGCAATGGGATTGAAAC | 34- |
| (SEQ ID NO: 644) | (SEQ ID NO: 712) | 37 |
| | GTTTCAATCCCATTGCTAGGATTCATTAATAAGAAAC | |
| | (SEQ ID NO: 780) | |
| OVJI010000022_17\|P | TGGCGGTACTGGTGGTACTGG | 16- |
| (SEQ ID NO: 645) | (SEQ ID NO: 713) | 22 |
| | CCAGTACCACCAGTACCGCCA | |
| | (SEQ ID NO: 781) | |
| CAAAFE010002307_2\|M | GTAGAAACCAACAGGGTTTCTGGAAAGGGATTGAAAG | 32- |
| (SEQ ID NO: 646) | (SEQ ID NO: 714) | 36 |
| | CTTTCAATCCCTTTCCAGAAACCCTGTTGGTTTCTAC | |
| | (SEQ ID NO: 782) | |
| OGWG01000020_5\|P | GTTCCCATCGTACTGACTTCTCTGGTCGTTCCCGAC | 27- |
| (SEQ ID NO: 647) | (SEQ ID NO: 715) | 40 |
| | GTCGGGAACGACCAGAGAAGTCAGTACGATGGGAAC | |
| | (SEQ ID NO: 783) | |
| OGWG01000020_4\|M | GTTCCCATCGTACTGACTTCTCTGGTCGTTCCCGAC | 27- |
| (SEQ ID NO: 648) | (SEQ ID NO: 715) | 40 |
| | GTCGGGAACGACCAGAGAAGTCAGTACGATGGGAAC | |
| | (SEQ ID NO: 783) | |
| OGWL01001214_2\|P | GTTGCCAACAGGGCGACTTCATTGGTTAATGGGAAG | 19- |
| (SEQ ID NO: 649) | (SEQ ID NO: 716) | 41 |
| | CTTCCCATTAACCAATGAAGTCGCCCTGTTGGCAAC | |
| | (SEQ ID NO: 784) | |
| OGW001000325_8\|P | CTCGAAATTCCTATTAATGCCTATCAGGAATTGAAAC | 32- |
| (SEQ ID NO: 650) | (SEQ ID NO: 717) | 37 |
| | GTTTCAATTCCTGATAGGCATTAATAGGAATTTCGAG | |
| | (SEQ ID NO: 785) | |
| OGWP01000327_5\|M | GTTCCCATCGTACTGACTTCTCTGGTCGTTCCCGAC | 33- |
| (SEQ ID NO: 651) | (SEQ ID NO: 715) | 42 |
| | GTCGGGAACGACCAGAGAAGTCAGTACGATGGGAAC | |
| | (SEQ ID NO: 783) | |
| OGWP01001429_1\|P | CTTTCTATCAGAGTGAGAAGTCCCCCTGTTGGGAACT | 32- |
| (SEQ ID NO: 652) | (SEQ ID NO: 718) | 44 |
| | AGTTCCCAACAGGGGGACTTCTCACTCTGATAGAAAG | |
| | (SEQ ID NO: 786) | |
| OGWP01001429_1\|M | CTTTCTATCAGAGTGAGAAGTCCCCCTGTTGGGAACT | 32- |
| (SEQ ID NO: 653) | (SEQ ID NO: 718) | 44 |
| | AGTTCCCAACAGGGGGACTTCTCACTCTGATAGAAAG | |
| | (SEQ ID NO: 786) | |
| SRR3989431_2283179_3\|M | CTCGCAATAGGTGATTGCCTGTTTTAAGAATTGAAAC | 37- |
| (SEQ ID NO: 654) | (SEQ ID NO: 719) | 45 |
| | GTTTCAATTCTTAAAACAGGCAATCACCTATTGCGAG | |
| | (SEQ ID NO: 787) | |
| SRR3989431_168870_5\|M | CCCGCAATAGACGATTGCCTATTTTATGGATTGAAAC | 31- |
| (SEQ ID NO: 655) | (SEQ ID NO: 697) | 43 |
| | GTTTCAATCCATAAAATAGGCAATCGTCTATTGCGGG | |
| | (SEQ ID NO: 765) | |
| SRR4754862_508403_7\|P | CTCGCAATAGGTGATTACCTGTTTTAAGGATTGAAAC | 35- |
| (SEQ ID NO: 656) | (SEQ ID NO: 720) | 39 |
| | GTTTCAATCCTTAAAACAGGTAATCACCTATTGCGAG | |
| | (SEQ ID NO: 788) | |
| SRR5468113_274154_3\|M | GTTGCCAAGAGGGTGACTAATTGGGTTAAG | 26- |
| (SEQ ID NO: 657) | (SEQ ID NO: 703) | 38 |
| | CTTAACCCAATTAGTCACCCTCTTGGCAAC | |
| | (SEQ ID NO: 771) | |
| SRR5468149_1084624_1\|P | GTTGCAATGGCTGAAACCCGGTTTACGGGACTGAAAC | 36- |
| (SEQ ID NO: 658) | (SEQ ID NO: 721) | 48 |
| | GTTTCAGTCCCGTAAACCGGGTTTCAGCCATTGCAAC | |
| | (SEQ ID NO: 789) | |
| SRR5574091_1575611_4\|M | CCGACAAACGACTAGAGTTGTCTAGGCAGTTGAAGG | 36- |
| (SEQ ID NO: 659) | (SEQ ID NO: 708) | 43 |
| | CCTTCAACTGCCTAGACAACTCTAGTCGTTTGTCGG | |
| | (SEQ ID NO: 776) | |
| SRR6475630_1852385_2\|M | CTCGCAATAGGTGATTACCTGTTTTAAGGA | 43 |
| (SEQ ID NO: 660) | (SEQ ID NO: 722) | |
| | TCCTTAAAACAGGTAATCACCTATTGCGAG | |
| | (SEQ ID NO: 790) | |
| SRR6475633_3251865_1\|M | CTCGCAATAGGTGATTACCTGTTTTAAGGATTGAAAC | 36- |
| (SEQ ID NO: 661) | (SEQ ID NO: 720) | 48 |
| | GTTTCAATCCTTAAAACAGGTAATCACCTATTGCGAG | |
| | (SEQ ID NO: 788) | |
| 3300031784\|Ga0315899_10084352_2\|M | GCGATCGGGACTGAAAC (SEQ ID NO: 723) | 25- |
| (SEQ ID NO: 662) | GTTTCAGTCCCGATCGC (SEQ ID NO: 791) | 26 |
| 3300031857\|Ga0315909_10035026_2\|M | CGACTAGAGTTGTCTAGGCAGTTGAAGG | 44- |
| (SEQ ID NO: 663) | (SEQ ID NO: 724) | 52 |
| | CCTTCAACTGCCTAGACAACTCTAGTCG | |
| | (SEQ ID NO: 792) | |
| 3300032092\|Ga0315905_10155087_1\|P | CTGACAGGTGACTAGAGTTGTCTAGGCAGTTGAAGG | 33- |
| (SEQ ID NO: 664) | (SEQ ID NO: 725) | 43 |
| | CCTTCAACTGCCTAGACAACTCTAGTCACCTGTCAG | |
| | (SEQ ID NO: 793) | |
| 3300032092\|Ga0315905_10155087_2\|M | CTGACAGGTGACTAGAGTTGTCTAGGCAGTTGAAGG | 33- |
| (SEQ ID NO: 665) | (SEQ ID NO: 725) | 43 |
| | CCTTCAACTGCCTAGACAACTCTAGTCACCTGTCAG | |
| | (SEQ ID NO: 793) | |
| SRR6476078_1283286_3\|P | GTTCCAATTAATCTTAAGTCCTATTAGGGATTGAAAC | 34- |
| (SEQ ID NO: 666) | (SEQ ID NO: 695) | 43 |
| | GTTTCAATCCCTAATAGGACTTAAGATTAATTGGAAC | |
| | (SEQ ID NO: 763) | |
| SRR6476078_1283286_3\|M | GTTCCAATTAATCTTAAGTCCTATTAGGGATTGAAAC | 34- |
| (SEQ ID NO: 667) | (SEQ ID NO: 695) | 43 |
| | GTTTCAATCCCTAATAGGACTTAAGATTAATTGGAAC | |
| | (SEQ ID NO: 763) | |
| SRR7812565_865334_1\|P | CTTGCAACTGGGCTTGGGGACTGAGGATAGTTGAAAC | 35- |
| (SEQ ID NO: 668) | (SEQ ID NO: 683) | 39 |
| | GTTTCAACTATCCTCAGTCCCCAAGCCCAGTTGCAAG | |
| | (SEQ ID NO: 751) | |
| SRR6448207_482583_3\|P | GGCGCAATCGACTTAAGCCCTTAGCAGGGATTGAAAC | 34- |
| (SEQ ID NO: 669) | (SEQ ID NO: 726) | 37 |
| | GTTTCAATCCCTGCTAAGGGCTTAAGTCGATTGCGCC | |
| | (SEQ ID NO: 794) | |
| SRR7244345_343276_44\|P | GTTCAAATAGCCTTTAATCCTTCGTAGGGGTTGAAAG | 33- |
| (SEQ ID NO: 670) | (SEQ ID NO: 727) | 36 |
| | CTTTCAACCCCTACGAAGGATTAAAGGCTATTTGAAC | |
| | (SEQ ID NO: 795) | |
| WP_016456110.1 | CGTCTTGCCCGTGCGCGTGTGGGGTGATC | 32- |
| (SEQ ID NO: 671) | (SEQ ID NO: 728) | 33 |
| | GATCACCCCACACGCGCACGGGCAAGACG | |
| | (SEQ ID NO: 796) | |
| AGZR01000008_18\|M | CGTCTTGCCCGTGCGCGTGTGGGGTGATC | 32- |
| (SEQ ID NO: 672) | (SEQ ID NO: 728) | 33 |
| | GATCACCCCACACGCGCACGGGCAAGACG | |
| | (SEQ ID NO: 796) | |
| SRR8162779_1368970_53\|P | GTTCAAATAGCCTTTAATCCTTCGTAGGGGTTGAAAG | 34- |
| (SEQ ID NO: 673) | (SEQ ID NO: 727) | 37 |
| | CTTTCAACCCCTACGAAGGATTAAAGGCTATTTGAAC | |
| | (SEQ ID NO: 795) | |
| SRR5855413_300079_4\|M | AAAGCCTATCAGGTATTGAAAG | 49- |
| (SEQ ID NO: 674) | (SEQ ID NO: 729) | 51 |
| | CTTTCAATACCTGATAGGCTTT | |
| | (SEQ ID NO: 797) | |
| SRR5855413_1311040_12\|M | GTTGAAATAAGCCTGAATGCCTATCAGGTATTGAAAG | 34- |
| (SEQ ID NO: 675) | (SEQ ID NO: 730) | 48 |
| | CTTTCAATACCTGATAGGCATTCAGGCTTATTTCAAC | |
| | (SEQ ID NO: 798) | |
| SRR5855415_346708_105\|P | GGTTTCTTCAGTTGCCTCGGCTTCAGGTTCAGC | 15 |
| (SEQ ID NO: 676) | (SEQ ID NO: 731) | |
| | GCTGAACCTGAAGCCGAGGCAACTGAAGAAACC | |
| | (SEQ ID NO: 799) | |
| SRR5855420_1331858_6\|7P | GTTGAAATAAGCCTGAATGCCTATCAGGTATTGAAAG | 34- |
| (SEQ ID NO: 677) | (SEQ ID NO: 730) | 44 |
| | CTTTCAATACCTGATAGGCATTCAGGCTTATTTCAAC | |
| | (SEQ ID NO: 798) | |
| SRR5855420_1331858_68\|M | GTTGAAATAAGCCTGAATGCCTATCAGGTATTGAAAG | 34- |
| (SEQ ID NO: 678) | (SEQ ID NO: 730) | 44 |
| | CTTTCAATACCTGATAGGCATTCAGGCTTATTTCAAC | |
| | (SEQ ID NO: 798) | |
| SRR5855435_639752_6\|P | AAAGCCTATCAGGTATTGAAAG | 49- |
| (SEQ ID NO: 679) | (SEQ ID NO: 729) | 51 |
| | CTTTCAATACCTGATAGGCTTT | |
| | (SEQ ID NO: 797) | |
| SRR6201738_878635_2\|M | CTAGCAATAACATTCATCCCCTGGCAGGGATTGAAAG | 34- |
| (SEQ ID NO: 680) | (SEQ ID NO: 732) | 38 |
| | CTTTCAATCCCTGCCAGGGGATGAATGTTATTGCTAG | |
| | (SEQ ID NO: 800) | |
| SRR6201739_286584_1\|P | TCTAGCAATAACATTCATCCCCTGGCAGGGATTGAAA | 31- |
| (SEQ ID NO: 681) | GGGC (SEQ ID NO: 733) | 34 |
| | GCCCTTTCAATCCCTGCCAGGGGATGAATGTTATTGC | |
| | TAGA (SEQ ID NO: 801) | |
| GCL37732.1 (SEQ ID NO: 682) | GTTTCTAGAAGTTCTGAGGACTGATTGTTGTTTAAAC | 35- |
| | (SEQ ID NO: 734) | 41 |
| | GTTTAAACAACAATCAGTCCTCAGAACTTCTAGAAAC | |
| | (SEQ ID NO: 802) | |

TABLE 3111
Non-coding Sequences of Representative
CLUST.057059 Systems

>3300002382|1017448|scaffold9922858_2|M
GCTGGGGAATAGCGGTTATGAAGGTTTATCCTGTCAGATAGCCACAGG
TGGGAACTACTGGAAGAGAGACGAAAATATCAACATCCCAATTAATAC
CAAGAAAGGTATTATTCACGTTAAAGGATACAAATTAGTTAAGGGTGA
TAAACTTTTATTTGACATTCCCCAGCAAGCTGATACTAACGCTGCTAG
AAATCATAAGCAAAATGGTGGTTTTGAACTGGGAGAGGTCAAATATCA
TAATGTTAAGCTAGTTTATCAAAAGCCTAAAAGATTTAAGAAAAAACG
CTTGACAAAGTAATAAGATTAGGCTAATATTAAATTACCGCAGTTTGG
GCGGGCAGCTAATAATATTAGCTTATGACTTCTAAGGCTTTTGCCTAA
AAAGTAAGGGGGAAGGCGACAACCCCCAAAGACCAGCCGGAACTATGG
CTGGCAACTATACCCTCTCTTTTGGCATATCAAAGCTAGGGCAAAAAC
CCCAGACATTCGCCAAAAGCCCAGAACCATGACATTGCAAGAGTTTCG
CCCAGTTTCTTTTAAAGATTCAAGCTGATTTAAGCGGCTGAAATGAGA
TTTTTTAATGTGTAATCGTCTAGCCTGGGAACATATATGCAACTTGCA
ATTAACTCAGTTCCTCAAGTCCGGTTTCACCTATTACCTAATAGATAG
GCACGCCACAGGAGACAATTCCCTTGCAATTAACTCAGTTCCCCAAGT
CCGGTTTCACCAATGACCAGGTGCGCGATCGCACCCCACAAGAGCAAA
CTTGCAATTAA
(SEQ ID NO: 735)
>3300005805|Ga0079957_1019747_2|M
AATTATGTCTCCGTTTGCTACTTGCTTAAACAGTTTAGATATGTTGGG
CTTATCTCCCCAGTAACAGCCAAACTCCAAAGATAGCTTTTCAAGTTC
AGCTTTTTCTTCCTCGGATATAGAGAGCGTGATACTCTCTTGTTTTCT
AGTCATAATGTTATTTTAGCCTAGCCTCTCTTGTCTCTATATCCCTAT
AATATCCTTATAGTTTTCCAGTGCCAACCCTAAAGTATACGGAATTTT
GCAATTGTTTAATTGTTGTATAAATAACTTGCTATGATGCTATACTAA
TAACTCGGTTGTCACCTGTGCAATACCGTCTGCCTAATCAGCAGACAT
TTATTAATCTACTAATTGTCAATAAGTAATAAGAACCCAGTGGTTAAA
ATGACGGGTTCTGTGGCTGTTTTCAAACAAGATTATTTGTCTACATTG
TTTACATTGTCTGACATTATTGTCTTACAAAAGAAAGCAGGAATTGGT
TGAAACATGACTGGGGTAAAGATTTGGGGTGTATGCAACTATCAGTTA
ATGTCTAATTTTTAATATAAAAAATATTTTTAAATTACCAAATTTGTG
CTATCCTAAATAAATACCAAAAAACGCGGTTAGTACCAATAACCACGT
TTCTATTACCAGGTACTTAGCCGCTAGTTTGGGGGAACGGCAACTAAC
AATATAGCACAAAACAGCTATTTACATCAACACCAATTGACAAAAACA
ACAGGAAGACGACGGACATGAAGACAATTAAGATTAAAATCAAACTCT
CATCAGAACAGGCGGCTGTGTGCGATCGCTACTTAGATGAATTAACAT
GGCTGTGGAATTTAGCACTTTCTAACCAACTACACAATCACTGCGTAG
ATTGGTATGCTTGGGCTGCTAAATTATTTGACGTTGCCCAACAAGCTG
ATACCAATGCTGCTAGAAATCATAAACAGAATGGTGGTTTTGAATTGG
GAGAGGTCAAATACCATAATGTTAGGCTGGTTTATCAAAAGCCTAAAA
GATTTAAGAAAAAACGCTTGACAAAGTAATAGGACTAGGTTAATATTA
AATTACCGCAGTTTGGACGGGTAGCTAATGTAATGTTAGCTTATGACT
TGTAAGGGTTTTACCCTAAAAAGTAAGGGGGAAGGCGACGACCCCCAA
AGACCAGCCGGAACTATGGCTGGCAACTATCTCATCTTTTTGGCATAT
CAAAGCTAGGGTAAAAACCCTGGACATTCGCCAAAAGTCCAGAACCAT
GACATTGCAAGAGTTTCGCTCAGTTTTCTTGCGACTGGGCTTAGAGAC
TGAGGATAGTTGAAACTCGCTCAGTTTCTTTTAAAGACCTAAGCTGAT
TTAAGCGGCTGAAATGAGATTTTTTAGCAGGTCCGCCAGAATTGCCTT
TGAAACCCTTGACTTATAAAGCTCTTGAAAGCCGGGAAAACCGGACTT
GAGGAACTGGGTTAATTGCAAGGCAAAGAATCAAAGCAAGACAAAGAA
ACGCTGAAACAGAATTTAATACTTTAACTTACATAACTCCCATCCCAA
ATACATAGCATGGGAGTTTTGCAACCCTGGACAATCTCTCATTATTTC
(SEQ ID NO: 736)
>3300023179|Ga0214923_10000634_60|P
GGCATTTTCTACCTTGCAAGAAAGTTAAAAGCTGTCCCGGTGAAAGGG
ATTGGGTGTAAAGTTTCAGGAATTGATATTATTTTTGCCATTAAAGGG
ATTGATTGTAGTTGTGTGTGGAATCCATCGTTTTTATTAATCCAATAT
CTTTAATGGCTATTTTTATCCAGAGTCAGGTTTTCCAGCTATGGAAAA
TCCACAAGTGGAAAAACCACAAGTGGAAAATCTGCTATATAATAAATA
TCTATTCCAATAAGTATTTAATTAAATAAGTATTTAAGAAAAAAGAAG
TATTTACGCTTTCTCTCATTAAAGAGGATTTAAGAAAAGAACTAACAC
AACAGATATCTGTTATTCTTGACTTAAAGACAAATATTTCTCTCAAGC
AGATAAATCTCTCATAGGATCAGGTTATGCCCGCCCGTTGCGCTTAAA
CACTATTACACAAAAAGCGAATAGATTTTGTTTGAGAATTTATAAAGC
AATTTTAAAGCGTACTTATTGCATAAATAAAAAATACCCACTAACACG
CTTTAGTGGGTATCAGGTTGAAACCTACAATGCAATTGTAATAACTAT
GTTTCCTGGTTTATAAATATAGTCCATCTTATTTTTTGTTTACTGTCA
AGTGGTTTTAAAAAATATTTGTTTTGTTTGTTTGCCTGTATTAATTAA
ATTATTAATAAATCACTTAATATTTATCTACTTATGCTATCATTAATA
AGTACCCAAAAACGTGATTATTCAAAGTAATCACGTTTTTATTACCAG
GTACTTAGTCGCTAGTTTGGATAACGACCTTGACATAATAGCATGAAA
ACAATCAAAATCAAAATCAAACTCACCACTGATCAGGTGCAACTGTGC
GATCGCTATTTGGAAGAATTGACATGGCTGTGGAATTTAACACTTTCT
AATCAACTACATAATCACTGTGTGACGTGGTACGATTGGGCGGCTAAA
TTTGATATTCCCCAGCAAGCTGATACTAACGCTGCTAGAAATCATAAG
CAGAATGGTGGTTTTGAACTGGGAGAGGTCAAGTATCATAATGTTAAG
CTAGTTTATCAAAAGCCTAAAAGATTTAAGAAAAAACGCTTGACAAAC
CAATAGGATTAGGTTAATATTAAATTACCGCAGTTTGGGCGGGTTGCT
AATAATATTAGCTTATGACTTCTAAGGCTTTTGCCTAAAAAGTAAGGG
GGAAGGCGACAACCCCCAAAGACCAGCCGGAACTATGGCTGGCAACTA
TCTCATCTTTTTGGCATATCAAAGCTAGGGCAAAAACCCCAGACATTC
GCCAAAAGCCCAGAACCATGACATTGCAAGAGTTTCGCCCAGTTTCTT
TTAAAGACCCAAGCTGATTTAAGCGGCTGAAATGAGATTTTTTAACAG
GTCCGCCAAAATCGCTTCTGAAACCCTTGATTTATAAAGCCTTTAAAC
CCCGGGGAAACGAAGCGAAATGAAACTTTGAACTAAGGACGGAACATC
TGAATCAAACTCAGTTCCAATTTAAACACTTTCTCACTTGATGGTGTC
CACTTAAACGTTTCGCAACAATACAAAGTGGAATTAAAGTAGAAAGGC
TTACCTAAATTATTGGTTAAAAAAGTATCAATCTCTGA
(SEQ ID NO: 737)
>OGWG01000020_4|M
CCCTGCCTTTGGAATCCTTACTGTGATTGGGTTCTGGAAGCAGTTTGC
GAGGTTCAATTCAAAAAGTCCATTTCAGCCGCTGAGATGTGCTTGTAA
TCTACCTCTAATCCTTACGTGGTAAGGCTGCGAGGTTCGTTTGATGGT
GTGCCATGTTTCCGGCACATCTATGTAGGTTGTCACCTTCCTACTTAC
TCCCGGTTAAGAGAGTCTTTGTACCTGGACACCAGATAATCCCGCCAG
AACTGCGGTACAAAACTATTATAACACAGATTTTGGAGTTGTGTGTAG
TTTGTCAAAAATAGTTAAAATTAATCTGTTATTGGATTAGACACTAGT
TTATTTTTATGTTTTATCCCCCTGCCTTTGGAATCCTTGCTGTGATTG
GGTTCTAAAACCAGTTTGCGAGGTTCAATTCAAAAAGTCCATTTCAGC
CGCTGAGATGTGCTTGTAATCTACCTCTAATCCTTACGTGGTAAGGCT
GCGAGGTTCGTTAGATGGTGTGCCATTATTCCGGCACATCTATGTAGG
TTGTCACCTTCCTACTTACTCCCAGTTAAGAGAGTCTTTGTACCTGGA
CACCAGGTAATTCCGCCAGAACTGCGGTACAAAACTAGTATAGCATAA
ATTTTGGAGTTGTGTTATAATTTTAAAAAATCAGTAGCAGGTGACCAT
AATGAAGACGATTTGTATCAAGGTAAAGTTATCGCCAGAACAGGAGAG
AGAGTTTAGTAATGCCACTCAAGAACTGGAGTGGATATGGAATTTCAG
TTTAAAGACGTATATACATAACCACTGTGTAAAGTGGTATGAATGGGC
TACGGGGGAGCTAGGAGAGGTCAAATACCATAATTTAAGCCTAGAATA
TAATGTTTCCGCACGTTGGAAACATAGAAATAGGAACAAGGTAAAACC
CGTTGTTTCCGTTACTAAGCTGCCTACCACAAGCACTCCCGTTCCTAA
TAAACCTAAATGAACTAAGTTATTGACAATATGAGTTATCAATTTAAA
TCATCTACCGCCAATCCCGTGTTTTTCCGGACTTATAGCCGTTTGACT
CCAGATGGTAGGGAATCATGGCAAGATGTGTGTAAACGCACCATATCT
GGTATGTCTGAACTAGGACGTTTTACACCAGAGGAA
(SEQ ID NO: 738)

### Example 14—Functional Validation of Engineered CLUST.057059 CRISPR-Cas System

[0462] Having identified components of CLUST.057059 CRISPR-Cas systems, a locus from the metagenomic source designated 3300023179 (SEQ ID NO: 601) was selected for functional validation.

### DNA Synthesis and Effector Library Cloning

[0463] To test the activity of the exemplary CLUST.057059 CRISPR-Cas system, the system was designed and synthesized using a pET28a(+) vector. Briefly, an E. coli codon-optimized nucleic acid sequence encoding the CLUST.057059 3300023179 effector (SEQ ID NO: 601 shown in TABLE 29) was synthesized (Genscript) and cloned into a custom expression system derived from pET-28a(+) (EMD-Millipore). The vector included the nucleic acid encoding CLUST.057059 effectors under the control of a lac promoter and an E. coli ribosome binding sequence. The vector also included an acceptor site for a CRISPR array library driven by a J23119 promoter following the open reading frame for the CLUST.057059 effector. The non-coding sequence used for the CLUST.057059 3300023179 effector (SEQ ID NO: 601) is set forth in SEQ ID NO: 619, as shown in TABLE 31. A separate condition was tested, wherein the CLUST.057059 3300023179 effector (SEQ ID NO: 601) was individually cloned into pET28a(+) without the non-coding sequence. See FIG. 1A.

[0464] An oligonucleotide library synthesis (OLS) pool containing “repeat-spacer-repeat” sequences was computationally designed, where “repeat” represents the consensus direct repeat sequence found in the CRISPR array associated with the effector, and “spacer” represents sequences tiling the pACYC184 plasmid or E. coli essential genes. In particular, the repeat sequence used for the CLUST.057059 3300023179 effector (SEQ ID NO: 601) is set forth in SEQ ID NO: 611, as shown in TABLE 30. The spacer length was determined by the mode of the spacer lengths found in the endogenous CRISPR array. The repeat-spacer-repeat sequence was appended with restriction sites enabling the bi-directional cloning of the fragment into the aforementioned CRISPR array library acceptor site, as well as unique PCR priming sites to enable specific amplification of a specific repeat-spacer-repeat library from a larger pool.

[0465] Next, the repeat-spacer-repeat library was cloned into the plasmid using the Golden Gate assembly method. Briefly, each repeat-spacer-repeat was first amplified from the OLS pool (Agilent Genomics) using unique PCR primers and pre-linearized the plasmid backbone using BsaI to reduce potential background. Both DNA fragments were purified with Ampure XP (Beckman Coulter) prior to addition to Golden Gate Assembly Master Mix (New England Biolabs) and incubated per the manufacturer's instructions. The Golden Gate reaction was further purified and concentrated to enable maximum transformation efficiency in the subsequent steps of the bacterial screen.

[0466] The plasmid library containing the distinct repeat-spacer-repeat elements and CRISPR effectors was electroporated into E. Cloni electrocompetent E. coli (Lucigen) using a Gene Pulser Xcell® (Bio-rad) following the protocol recommended by Lucigen. The library was either co-transformed with purified pACYC184 plasmid or directly transformed into pACYC184-containing E. Cloni electrocompetent E. coli (Lucigen), plated onto agar containing chloramphenicol (Fisher), tetracycline (Alfa Aesar), and kanamycin (Alfa Aesar) in BioAssay® dishes (Thermo Fisher), and incubated for 10-12 hours at 37° C. After estimation of approximate colony count to ensure sufficient library representation on the bacterial plate, the bacteria were harvested, and plasmid DNA WAS extracted using a QIAprep Spin Miniprep® Kit (Qiagen) to create an “output library.” By performing a PCR using custom primers containing barcodes and sites compatible with Illumina sequencing chemistry, a barcoded next generation sequencing library was generated from both the pre-transformation “input library” and the post-harvest “output library,” which were then pooled and loaded onto a Nextseq 550 (Illumina) to evaluate the effectors. At least two independent biological replicates were performed for each screen to ensure consistency. See FIG. 1B.

### Bacterial Screen Sequencing Analysis

[0467] Next generation sequencing data for screen input and output libraries were demultiplexed using Illumina bcl2fastq. Reads in resulting fastq files for each sample contained the CRISPR array elements for the screening plasmid library. The direct repeat sequence of the CRISPR array was used to determine the array orientation, and the spacer sequence was mapped to the source (pACYC184 or E. Cloni) or negative control sequence (GFP) to determine the corresponding target. For each sample, the total number of reads for each unique array element (rₐ) in a given plasmid library was counted and normalized as follows: (rₐ+1)/total reads for all library array elements. The depletion score was calculated by dividing normalized output reads for a given array element by normalized input reads.

[0468] To identify specific parameters resulting in enzymatic activity and bacterial cell death, next generation sequencing (NGS) was used to quantify and compare the representation of individual CRISPR arrays (i.e., repeat-spacer-repeat) in the PCR product of the input and output plasmid libraries. The array depletion ratio was defined as the normalized output read count divided by the normalized input read count. An array was considered to be “strongly depleted” if the depletion ratio was less than 0.3 (more than 3-fold depletion), depicted by the blue dashed line in FIG. 42. When calculating the array depletion ratio across biological replicates, the maximum depletion ratio value for a given CRISPR array was taken across all experiments (i.e. a strongly depleted array must be strongly depleted in all biological replicates). A matrix including array depletion ratios and the following features were generated for each spacer target: target strand, transcript targeting, ORI targeting, target sequence motifs, flanking sequence motifs, and target secondary structure. The degree to which different features in this matrix explained target depletion for CLUST.057059 systems was investigated.

[0469] FIG. 42 shows the degree of interference activity of the engineered compositions, with a non-coding sequence, by plotting for a given target the normalized ratio of sequencing reads in the screen output versus the screen input. The results are plotted for each DR transcriptional orientation. In the functional screen for each composition, an active effector complexed with an active RNA guide will interfere with the ability of the pACYC184 to confer E. coli resistance to chloramphenicol and tetracycline, resulting in cell death and depletion of the spacer element within the pool. Comparison of the results of deep sequencing the initial DNA library (screen input) versus the surviving transformed E. coli (screen output) suggests specific target sequences and DR transcriptional orientations that enable an active, programmable CRISPR system. The screen also indicates that the effector complex is only active with one orientation of the DR. As such, the screen indicated that the CLUST.057059 3300023179 effector was active in the “forward” orientation (5′-CTTG . . . AAAC-[spacer]-3′) of the DR (FIG. 42). The CLUST.057059 3300023179 effector did not retain activity in the absence of the non-coding sequence, indicating that CLUST.057059 effectors require a tracrRNA.

[0470] FIG. 43A and FIG. 43B depict the location of strongly depleted targets for the CLUST.057059 3300023179 effector (plus non-coding sequence) targeting pACYC184 and E. coli E. Cloni essential genes, respectively. Flanking sequences of depleted targets were analyzed to determine the PAM sequence for CLUST.057059 3300023179. A WebLogo representation (Crooks et al., Genome Research 14: 1188-90, 2004) of the PAM sequence for CLUST.057059 3300023179 is shown in FIG. 44, where the “20” position corresponds to the nucleotide adjacent to the 5′ end of the target.

### Example 15—Targeting of Mammalian Genes

[0471] This Example describes an indel assessment on a mammalian target by the effector disclosed herein introduced into mammalian cells by transient transfection.

[0472] An effector described herein is cloned into a pcda3.1 backbone (Invitrogen). The plasmid is then maxi-prepped and diluted to 1 μg/L. For RNA guide preparation, a dsDNA fragment encoding an RNA guide is derived by ultramers containing the target sequence scaffold, and the U6 promoter. Ultramers are resuspended in 10 mM Tris-HCl at a pH of 7.5 to a final stock concentration of 100 μM. Working stocks are subsequently diluted to 10 μM, again using 10 mM Tris.HCl to serve as the template for the PCR reaction. The amplification of the RNA guide is done in 50 μL reactions with the following components: 0.02 μl of aforementioned template, 2.5 μl forward primer, 2.5 μl reverse primer, 25 μL NEB HiFi Polymerase, and 20 μl water. Cycling conditions are: 1×(30 s at 98° C.), 30×(10 s at 98° C., 15 s at 67° C.), 1×(2 min at 72° C.). PCR products are cleaned up with a 1.8×SPRI treatment and normalized to 25 ng/μL.

[0473] The sequence of a target locus is selected as described herein. For example, a target locus adjacent to a PAM sequence of TABLE 34 is selected.

TABLE 34
PAM sequence for target selection.

| Effector Family | PAM Sequence |
|---|---|
| CLUST.133120 | 5′-TTN-3′ |
| | 5′-TN-3′ |
| CLUST.099129 | 5′-GTN-3′ |
| | 5′-TG-3′ |
| | 5′-TR-3′ |
| | 5′-RATG-3′ (SEQ ID NO: 920) |
| CLUST.342201 | 5′-AAG-3′ |
| | 5′-AAD-3′ |
| | 5′-AAR-3′ |
| | 5′-RAAG-3′ (SEQ ID NO: 921) |
| | 5′-RAAR-3′ (SEQ ID NO: 922) |
| | 5′-RAAD-3′ (SEQ ID NO: 923) |
| CLUST.195009 | 5′-TTN-3′ |
| CLUST.057059 | 5′-GTN-3′ |

[0474] A crRNA sequence is selected as described herein. For example, a crRNA comprises a direct repeat sequence of the length and sequence described herein. Non-limiting examples of direct repeats are shown in TABLE 35.

TABLE 35
Direct Repeat for crRNA design.

| Effector | Direct Repeat Sequence |
|---|---|
| CLUST.13312 | CCAACCAATGCCAGCGCGACGGCTTATGAGTCG |
| 0 3300027740 | CGAC (SEQ ID NO: 51) |
| (SEQ ID | AATGCCAGCGCGACGGCTTATGAGTCGCGAC |
| NO: 1) | (SEQ ID NO: 85) |
| CLUST.099129 | AGTCGCGAATAACTGTTCAGCGGAGAAGCCGCT |
| SRR6837557 | GAAAC (SEQ ID NO: 146) |
| (SEQ ID | ATAACTGTTCAGCGGAGAAGCCGCTG |
| NO: 101) | (SEQ ID NO: 181) |
| CLUST.34220 | GTTCACCCCACGGGTGCGTGGAGTGATGG |
| 1 3300006417 | (SEQ ID NO: 342) |
| (SEQ ID | |
| NO: 301) | |
| CLUST.195009 | CCAGCAACAGCCGCGTGGGGCTACTAGTACTGC |
| SRR6201554 | GAC (SEQ ID NO: 522) |
| (SEQ ID | CAACAGCCGCGTGGGGCTACTAGTACTGCG |
| NO: 501) | (SEQ ID NO: 535) |
| CLUST.05705 | CTTGCAACTGGGCTTGGGGACTGAGGATAGTTG |
| 9 3300023179AAA | C (SEQ ID NO: 683) |
| (SEQ ID | |
| NO: 601) | |

[0475] Approximately 16 hours prior to transfection, 100 μl of 25,000 HEK293T cells in DMEM/10% FBS+Pen/Strep are plated into each well of a 96-well plate. On the day of transfection, the cells are 70-90% confluent. For each well to be transfected, a mixture of 0.5 μl of Lipofectamine 2000 and 9.5 μl of Opti-MEM is prepared and then incubated at room temperature for 5-20 minutes (Solution 1). After incubation, the lipofectamine:OptiMEM mixture is added to a separate mixture containing 182 ng of effector plasmid and 14 ng of crRNA and water up to 10 μL (Solution 2). In the case of negative controls, the crRNA is not included in Solution 2. The solution 1 and solution 2 mixtures are mixed by pipetting up and down and then incubated at room temperature for 25 minutes. Following incubation, 20 μL of the Solution 1 and Solution 2 mixture are added dropwise to each well of a 96 well plate containing the cells. 72 hours post transfection, cells are trypsinized by adding 10 μL of TrypLE to the center of each well and incubated for approximately 5 minutes. 100 μL of D10 media is then added to each well and mixed to resuspend cells. The cells are then spun down at 500 g for 10 minutes, and the supernatant is discarded. QuickExtract buffer is added to ⅕ the amount of the original cell suspension volume. Cells are incubated at 65° C. for 15 minutes, 68° C. for 15 minutes, and 98° C. for 10 minutes.

[0476] Samples for Next Generation Sequencing are prepared by two rounds of PCR. The first round (PCR1) is used to amplify specific genomic regions depending on the target. PCR1 products are purified by column purification. Round 2 PCR (PCR2) is done to add Illumina adapters and indexes. Reactions are then pooled and purified by column purification. Sequencing runs are done with a 150 cycle NextSeq v2.5 mid or high output kit.

[0477] Percentages of indels in the target locus in HEK293T cells following transfection are calculated. Indel percentages over background are indicative of nuclease activity in mammalian cells.

### OTHER EMBODIMENTS

[0478] It is to be understood that while the invention has been described in conjunction with the detailed description thereof, the foregoing description is intended to illustrate and not limit the scope of the invention, which is defined by the scope of the appended claims. Other aspects, advantages, and modifications are within the scope of the following claims.

The application's sequence listing, which the Patent Office published only in electronic form, follows.

SEQUENCE LISTING (923 sequences)

SEQ ID NO: 1 - protein, 498 aa, Unknown
  Description of Unknown: terrestrial-soil sequence
MTTKVFKYGALPVTLDSEIRKKMKLAREYYNQLVEAENGRRKTVWGGERPKQPPHEHKDEPVCEECKKHWKDIRDKYFATPPLDIKPLRAKASEAGLYWGTYLIIEESFSAAWKKTDGLSTVRYKSWRDGGIMGVQLQQAHSANGFYRIEQAPDPRKGRKAGQRHAVKIRIGTRENKPVWSEPIAFEMHRPLQGRPTWVKICYFYRGEREIWSVNITCTDVPERALPDTAKVLAIDIGWRVMSDDSIRAAYARDENGNESELLFDSRWRECGDRADRIRSARDDRLNELKKKDTRFSLIKKPSGIRGYVAKNSIEDTEVTEWIKQDRHLEQYELGCRRRSVAVRKEKLRVWLSSLRKQYATAIIKDSSHKEMKAAKRAKADGMPPPARRNAHHGAPGEIVEEICRAFGRQTNIAIVEAPGTTATCASCGQEMEIGAELMITCERCNAREDRDCISTRNMLRLYASGNCKKPTARKTIARFAKRHKNYVEPNQCQRDGL

SEQ ID NO: 2 - protein, 517 aa, Unknown
  Description of Unknown: aquatic-non marine saline and alkaline-hypersaline lake sediment sequence
MKVFKYGARPVNQESLIRDQMKLARNYYNKLVETENKRRQQAWGSEKPPPPPHPPEEVVLPDGSKKTKWCRCEECKTHWKTLREAYYALDNLDKKPLRAAASSWGLYWGSYLLVEQAFDQAQKTTVYYDPVRFRGWRKGGQAGLQIQNGKNTDSLFKVEEIPDPEPSARSKKNDRRAGKGKRRGQLRTLRIRIGTEGRTPIWSDPIIFKMHRPLEGTVCWLKICMFYRGDREIWSVNFTCKDTSPRTDSATDGVVAIDVSWRQLPNGDIRLAYARGDNGFEDELTLDNSWLERIKKAERIQSHRDERLNDLKTSDSRFRLFKSPRSARIHIMKNQIAELEDWAKREKHLEQYELGCKRKTYDVRRDAVRVWLRKLRRLYQTVVIKDSSHKEMKEQAKAKKKLHRAARKQGHHGAPGEIVEEICKVFGRIENVAVVIAENTTATCPVCGHMHEVNKERMITCERCGTTDDRDRISTHNLLSRFFDGQYEKPTARKTESKFAKKHKKVEQEVKHLRDGL

SEQ ID NO: 3 - protein, 756 aa, Unknown
  Description of Unknown: aquatic-freshwater sequence
MIKLLTYDGDCVFVHAGDTTLKTTKAFTHGTIVFDEKARTVTFGKTDAVALPDDLSLKENATLNFQLVAPDGTLRKQVRSGILKANEKQPGLLHISGMAKSPRRYAAEDGWGNAIYKYRAYFTHPGLNTDGELPEWLKGSIHRQKAFWNQLAWLCRDARRNCSPVPTEEIIAFVQQTILPEIDAFNDSLGRSKDKMKHPAKLKKEDPGIDNLWHFVGELRTRIAKGRAVPDGLLEKVITFAQQYKPDYTPLNEFLNHFTEIAETEAAALKLRRFEIRPTMTAFRASLNRRQTNKSTWSEGWPLIKYPDSPKADDWSLNYYLNKAAVDAAGLESGVNVGGLSFGPALEPAATGHANLHGDAAKRKMREAEISILGPDKEPWKFRFGVLQHRPLPENSHIKEWKLLFHNGALWLDIVVELQRPLPATGGLTAGLEIGWRRTEEGIRFGTLYEPVRSTIRELTIDLQRSPKDQKDRVPFRIDMGPNRWEKRNIARLFLKHKPGEELKFSKASDSIRQIAALFPDWKAGDMVPNMLGVRDVLQRRRDAAMQTTKIQMRQHLGEQTPAWLDKAGRRGLLRLQEELKDDAKAQAILNPWWVNDEVIGKLARFYTARSVRRMEYGQMQVAHDVCRYLRDNGVSRLIVEAKFLAKVAQQQDSNDPVVLQLSQKYRQFSASAKFLAFLKNTAAKYGIVIDTHVALNISRICHYCDHLNPPTAKESYQCEKCKRVVKQDPNAAINLARFGSDPELAEMAAQAGRVE

SEQ ID NO: 4 - protein, 487 aa, Unknown
  Description of Unknown: aquatic-freshwater-groundwater sequence
MRLGRECYNALVEVENARRHLAWGGDIPPKPPHPLPLTQDGDENDDETAWCRCAECKAHWMGIREALHALPPIDTKPIYAHYCTNGPLYWGTFNHVAQAFSAAWKKTRPWRPVKYRSWRQGGVIAVQIQAGYQKRQNYDTLFRINDVVDTRTRHRHKGHHRATVQLALGAGRMTSPIEIEQHRPIVGTPTWVTARLCYDSLGRERAAVNFTRRDVPQRTDLAPRGVVAVDVSWRQVPDGLRIAWTRDDQGHNDQLVLDTRWQFLAKHADQLQAIRDQNLNLLKAVDPAFAQAKSPRHACLILAEIEDPSAVARAWRYREEHLRNYEMGERRHSVNRRRDALRKWARELRRNYAEVVVKDSQHKEMKETAKQDKLSRKARRQGQHGAPGEVIAVLREIFGDDGMWLVEAAYTTDRCPLCGHLNAHGAERIVVCEECGEGLDRDLVSTRNMLVAYAAEERRRPTARKTAARFGKRHKTSTSLDNASPAA

SEQ ID NO: 5 - protein, 580 aa, Unknown
  Description of Unknown: aquatic-freshwater-peatland sequence
MAWLCRETRLKCSPVPTDKIVDFVQNAILPEIDAFNSAPGRSRERMKHPAKLKIETPGLDCLWGFVGELRARTGKGRAVPAGLLDKVVEFAQQFKTDYTPFNEFIAGFQAIAEREAAALGLRHFEIRPTVGAFKAVLDRRKTTKAHWSEGWPLIKYPDSPKAANWGLHYHLNKAGVDSALLEREEGIPGLSFGPRLKPADTGHEKLTGVAAKRILREAQISISGDNDERWTFHFGVLQHRPLPPNSHLKEWKLIFQGGALWLCLVVELQRPVPVPGPHPAGLDIGWRRTEEGIRFGTLYEPATKTIRELTVDLQKSPCDHKDRVPFRIDLGPSRWEMRNATELVPDWKPGQPIPSAFETRSVLQIRRDRIKETAKRQLREHLGERLPVWFDKAGRRGLLKLAQDFKNESAVCEILNIWQQKDEQLGKLASMYFDRSTKRIEYGHAQVAHDVCRFLQQKGVMRLIVETSFLSKVSQHQDNEDLVSIERSQKYRQFVAVGKFLAALKNTTRKYGIVVETVNAMNTTRTCQYCNALNPRTEEEQFTCKRCGRQVQQDHNAAVNLSRFGSDPVLAEMALHADEV

SEQ ID NO: 6 - protein, 511 aa, Unknown
  Description of Unknown: aquatic-marine-marine sediment sequence
MTKVYKYGALPGGDTLCAQMNLGRVYYNSLVEAENERRTTMWGGDRPPSPATHVCKKSCSTCDKAESKKRKPRKHECKKFCPVCRAHYKALRKQYRSEPPLDVKPFRKKAAEGGLYWGTYLVIEQDFSAAWKETESFSLVKFRSWRQGDMCAVQIQRDKDPDRMFLIKSAPDPRKKKQQRYTLRLRVGSKGQAPVWAEPLPFEMHRPLQGTATWVKIARKYVADRVIWSVQFTRRDIPERKDNAERGAVAIDVGWRKTDDGMRIAYARGDDGAEYELVLPPKWMKHADQADRIRSARDQNLVELQKQERFWSVILAVCGFSNKKLFARLKSTLSVRRVAKPGEHTKWIKKERHLWQYEAGCRNRSVTRRRNDVRVWLRDLRRRYAHAVIKDSCHKKMKENKTSLPKPARRQGHHAAPGEVIEEITRVFGRITGVSVVCAVDTTNHCPACSFVNSYGPERVVTCGGCGVVEDRDRVSTQNMMNMYAIGNVRNPTTRKSTPRFAKKHKDPEAP

SEQ ID NO: 7 - protein, 492 aa, Unknown
  Description of Unknown: aquatic-marine-marine sediment sequence
MNLGRVYYNSLVEAENERRTTMWGGDRPPSPATHVCKKSCSTCDKAESKKRKPRKHECKKFCPVCRAHYKALRKQYRSEPPLDVKPFRKKAAEGGLYWGTYLVIEQDFSAAWKETESFSLVKFRSWRQGDMCAVQIQRDKDPDRMFLIKSAPDPRKKKQQRYTLRLRVGSKGQAPVWAEPLPFEMHRPLQGTATWVKIARKYVADRVIWSVQFTRRDIPERKDNAERGAVAIDVGWRKTDDGMRIAYARGDDGAEYELVLPPKWMKHADQADRIRSARDQNLVELQKQERFWSVILAVCGFSNKKLFARLKSTLSVRRVAKPGEHTKWIKKERHLWQYEAGCRNRSVTRRRNDVRVWLRDLRRRYAHAVIKDSCHKKMKENKTSLPKPARRQGHHAAPGEVIEEITRVFGRITGVSVVCAVDTTNHCPACSFVNSYGPERVVTCGGCGVVEDRDRVSTQNMMNMYAIGNVRNPTTRKSTPRFAKKHKDPEAP

SEQ ID NO: 8 - protein, 511 aa, Unknown; identical to SEQ ID NO: 6
  Description of Unknown: marine sediment metagenome sequence

SEQ ID NO: 9 - protein, 492 aa, Unknown; identical to SEQ ID NO: 7
  Description of Unknown: marine sediment metagenome sequence

SEQ ID NO: 10 - protein, 511 aa, Unknown; identical to SEQ ID NO: 6
  Description of Unknown: marine sediment metagenome sequence

SEQ ID NO: 11 - protein, 492 aa, Unknown; identical to SEQ ID NO: 7
  Description of Unknown: marine sediment metagenome sequence

SEQ ID NO: 12 - protein, 511 aa, Unknown
  Description of Unknown: marine sediment metagenome sequence
MTKVYKYGALPGGDTLCAQMNLGRVYYNSLVEVENERRTTMWGGDRPPSPATHVCKKSCSTCDKAESKKRKPRKHECKKFCPVCRAHYKALRKQYRSEPPLDVKPFRKKAAEGGLYWGTYLVIEQDFSAAWKETESFSLVKFRSWRQGDMCAVQIQRDKDPDRMFLIKSAPDPRKKKQQRYTLRLRVGSKGQAPVWAEPLPFEMHRPLQGTATWVKIARKYVADRVIWSVQFTRRDIPERKDNAERGAVAIDVGWRKTDDGMRIAYARGDDGAEYELVLPPKWMKHADQADRIRSARDQNLVELQKQERFWSVILAVCGFSNKKLFARLKSTLSVRRVAKPGEHTKWIKKERHLWQYEAGCRNRSVTRRRNDVRVWLRDLRRRYAHAVIKDSCHKKMKENKTSLPKPARRQGHHAAPGEVIEEITRVFGRITGVSVVCAVDTTNHCPACSFVNSYGPERVVTCGGCGVVEDRDRVSTQNMMNMYAIGNVRNPTTRKSTPRFAKKHKDPEAP

SEQ ID NO: 13 - protein, 492 aa, Unknown
  Description of Unknown: marine sediment metagenome sequence
MNLGRVYYNSLVEVENERRTTMWGGDRPPSPATHVCKKSCSTCDKAESKKRKPRKHECKKFCPVCRAHYKALRKQYRSEPPLDVKPFRKKAAEGGLYWGTYLVIEQDFSAAWKETESFSLVKFRSWRQGDMCAVQIQRDKDPDRMFLIKSAPDPRKKKQQRYTLRLRVGSKGQAPVWAEPLPFEMHRPLQGTATWVKIARKYVADRVIWSVQFTRRDIPERKDNAERGAVAIDVGWRKTDDGMRIAYARGDDGAEYELVLPPKWMKHADQADRIRSARDQNLVELQKQERFWSVILAVCGFSNKKLFARLKSTLSVRRVAKPGEHTKWIKKERHLWQYEAGCRNRSVTRRRNDVRVWLRDLRRRYAHAVIKDSCHKKMKENKTSLPKPARRQGHHAAPGEVIEEITRVFGRITGVSVVCAVDTTNHCPACSFVNSYGPERVVTCGGCGVVEDRDRVSTQNMMNMYAIGNVRNPTTRKSTPRFAKKHKDPEAP

SEQ ID NO: 14 - protein, 484 aa, Unknown
  Description of Unknown: marine sediment metagenome sequence
MKLGREYYNALVEVENKRRQKAWGAETVPAPPHEDCKLPKCLECRDHWRAIRKRVRDEPLIDFKPLRAEFADRGLYWGTYLCIEDAFARAWKDRDSLRLVKFRSWRHGGIAGVQIQKATWQRSMGTTMFETASAGDTRTGRRARFGGRRVARLRIGSEDRAPLWCEDVPYEQHRAIEGRVTWVKIAMKYRGDREIWSVTFTCSDVPERPASDEAARGVVAVDVGWRRIDDDLRIAYARSDQGVVSELRMGPRWRELWERADRIRGHRDDHHNELLASGVEVPGQSRSANGLRSDIEKLIAAGENVGPELLAWMHRDRHLAQYETGCRRRSVDCRTDAMRKWARELRRTYATVVLKKTSTKKQKETAKENGLVPPARRQGQHAAPGEVLEYLTTTFGRDRTFLVKSKDTTNQCCRCGHVNNHGPETIITCEQCGDAIDRDEASTQNMMELWVASECEEPTARKTTARFVKRHRKEGSPDNASPPA

SEQ ID NO: 15 - protein, 506 aa, Unknown
  Description of Unknown: marine sediment metagenome sequence
MATRVYKFGARSPGEATLLRAQMKLGREYYNALVEVENKRRQKAWGAETVPAPPHEDCKLPKCLECRDHWRAIRKRVRDEPLIDFKPLRAEFADRGLYWGTYLCIEDAFARAWKDRDSLRLVKFRSWRHGGIAGVQIQKATWQRSMGTTMFETASAGDTRTGRRARFGGRRVARLRIGSEDRAPLWCEDVPYEQHRAIEGRVTWVKIAMKYRGDREIWSVTFTCSDVPERPASDEAARGVVAVDVGWRRIDDDLRIAYARSDQGVVSELRMGPRWRELWERADRIRGHRDDHHNELLASGVEVPGQSRSANGLRSDIEKLIAAGENVGPELLAWMHRDRHLAQYETGCRRRSVDCRTDAMRKWARELRRTYATVVLKKTSTKKQKETAKENGLVPPARRQGQHAAPGEVLEYLTTTFGRDRTFLVKSKDTTNQCCRCGHVNNHGPETIITCEQCGDAIDRDEASTQNMMELWVASECEEPTARKTTARFVKRHRKEGSPDNASPPA

SEQ ID NO: 16 - protein, 532 aa, Unknown
  Description of Unknown: marine sediment metagenome sequence
MKVYKFGALRPTENLDKFFEQTQMAHALYQRMVEERNAEREAALEPFKPFSPPHENCYEKRLAAAREKSKQTKKRVKIKRCKKCDDYWIPIYKEAYKTLEFYKKPTCKEMTAEGLYWGTYQLIAEAFDRADDDTKLMRSIKYRKWPTVKHAVRVQIQDPDKAESYFRVEVVPDRFDRWREERKRPMPWRVLWIRVGSDGRKPIWLKVPYKEHRPIDGRVTHVTVQRYFIADRERWEVLFTCKSEAERRDSATKGLVAVDVGWRKMDDGSIRCAYAQDVEGNVSELRLPPEWIERITRADRIRGHRDENLNALLETAGSSLTHGIRSWAGVRRAYRRHLEAGGEKIAEVEEALKRDRHLWQYELGNRVRAERRRRNDFRVWARELRRCYAVIVTKNTSHKEVKEKANKGPKKLPQKARNQGQHAAPGELIETLRRVFGWEGPKITGNALEVSAENTSRICAKCFHENEGSEKRIVVCEKCGVKDDRDHRSTRNMLRDVAAMKVTFGTARKRPSKYANRHKKKESSSNASETAS

SEQ ID NO: 17 - protein, 511 aa, Unknown; identical to SEQ ID NO: 12
  Description of Unknown: marine sediment metagenome sequence

SEQ ID NO: 18 - protein, 492 aa, Unknown; identical to SEQ ID NO: 13
  Description of Unknown: marine sediment metagenome sequence

SEQ ID NO: 19 - protein, 511 aa, Unknown; identical to SEQ ID NO: 6
  Description of Unknown: marine sediment metagenome sequence

SEQ ID NO: 20 - protein, 492 aa, Unknown; identical to SEQ ID NO: 7
  Description of Unknown: marine sediment metagenome sequence

SEQ ID NO: 21 - protein, 605 aa, Unknown
  Description of Unknown: microbial mat metagenome sequence
MTTTKVLKFWCEPADDDSKELLMQQISLGYTYARSLDDAENTRRRSFRDHLMDVTPFKEAENELTALYESTSKENRDDAFRTKVELLRSAKKDVYISSKTTEPFVSKIKEDQDRYRAEVRRIRADLGPRGHGLSFGSYQHEEDAHLQSKSTRAPYLPLIRKRLPKEGTFAVHLQSEYKAPIQNVLDGSCRWVSIGSEMYSISRKVKYGSRTRDDSKSRGRRLRQVSLRVSGKGGDTKLIKVHALIHRMPVTGTVVWARIHTQRTGRKLRYSLQISVDNPVFPADVKNIRTAKSGVIGIDLGWRETDEGFLIATASEQNGNQLPPLIIPKEVALRGITHQRIDSRCETLQSTRDQKFNDIINRIRHVRDSAADWFREHTQHCHKWRSPGKVVGLFSKWRNNRWNGDDEIFDATSAFIKKDGHLWDWEAHNRTRMSRQIRGTYQRWADILASNYAEIRIENLDIKQAAEDFRKKAESEHQKDNNKSKSPLIDTRAKLQLAHVGHSLVRSCNRNECNLGRVDKRYTSRKCHLCGTKGKKTSDKLVFCKNKECALYNCAVDRDIRAALNIASSEVLEWVAGPLAAPKEPKERKNPRRRTKQAETISAAA

SEQ ID NO: 22 - protein, 645 aa, Unknown
  Description of Unknown: peat metagenome sequence
MATKVLKFYCVPASARDNQLLCEQVKLGSMYRRDLAWIENRARELRRAIADWPARDVPIEKRSEWWKSDVGRAASKAWHESDECKRLKKSITDGQIQAATAARKKARRFDTAWGTCGLAAEAAEAARVALEKEFGLIDKETGQTTFVNTKFPSDEGRVGVQFQRDTDKIDEETGEVIPAKKPTIYADELIGGSHNFCRIGSARYSLLDRVDGFQPAALDASGAPIDSFGYKSKQPKGKRFHLLQIRVGTVDKRSTAYPFDLDPDKGEPIWAKLHVLLHQKTKRPQTLPHERVKWVFVQRVRCALRYRWSVCFVIEDSVVQKPHEQPNDRVAVDLGWRQLFDESGTPAGIRLLYWMATSPLDLNDPSSPVEGQLVIPQHVVDRKPFSSQLESNRTKNREAMQAMLLAYLQSVSSATWLAKRTAQLASWKKPSKFVLLLNEWRKNRIAGDQAAFAALEAWNKQDAHLYLWSAPNITKMQRQIQGRVDQFAVQLARRYGIVIVENFKLPDVIEKKDLQEQDQDAQKLRKKNARRVNVVAPGRARAALKRFATKYNSHYIEEESAFTTVDCASCGHRREFDLKNARAQLLLACDNCGVVEDQDRTAARNLLAGASAIARGENGWPLEAKVSKASKKKVVLRRTRKRIVV

SEQ ID NO: 23 - protein, 616 aa, Unknown
  Description of Unknown: peat metagenome sequence
MYRRDLAWIENRARELRRAIADWPARDVPIEKRSEWWKSDVGRAASKAWHESDECKRLKKSITDGQIQAATAARKKARRFDTAWGTCGLAAEAAEAARVALEKEFGLIDKETGQTTFVNTKFPSDEGRVGVQFQRDTDKIDEETGEVIPAKKPTIYADELIGGSHNFCRIGSARYSLLDRVDGFQPAALDASGAPIDSFGYKSKQPKGKRFHLLQIRVGTVDKRSTAYPFDLDPDKGEPIWAKLHVLLHQKTKRPQTLPHERVKWVFVQRVRCALRYRWSVCFVIEDSVVQKPHEQPNDRVAVDLGWRQLFDESGTPAGIRLLYWMATSPLDLNDPSSPVEGQLVIPQHVVDRKPFSSQLESNRTKNREAMQAMLLAYLQSVSSATWLAKRTAQLASWKKPSKFVLLLNEWRKNRIAGDQAAFAALEAWNKQDAHLYLWSAPNITKMQRQIQGRVDQFAVQLARRYGIVIVENFKLPDVIEKKDLQEQDQDAQKLRKKNARRVNVVAPGRARAALKRFATKYNSHYIEEESAFTTVDCASCGHRREFDLKNARAQLLLACDNCGVVEDQDRTAARNLLAGASAIARGENGWPLEAKVSKASKKKVVLRRTRKRIVV

SEQ ID NO: 24 - protein, 733 aa, Unknown
  Description of Unknown: permafrost metagenome sequence
MIDRLTFDGKCVYVHLAAISLKATKVFTHGGWVFDLAAHTVAFKDIPPVALPENLTLSDGASLTFQLVAPDGTLRKQVRSGVLKSNDKQPGILRIAGRSKTPANFSAADGWKIEVFKYRAYFTHPGLKTEAGLPEWLQNSIKRQRDFWNRMAWLCRDARRRCSPVPTEEIVAFVQESVLPAIDEFNNSLGIARSKEKIKHPINLKIEMPGLDAVWKFVGELRKRIAKNRGVPDGLLEKVVAFAEQFKADYGPLNEFISNLESIAKIESTALGLRQFEIRPTINSFKAVLDRRKTLKSAWSDGWPHIKYADSPRAADWGVYYYFNKSGVDSARLEAGPGVPGLTFGRPLKPADTGHKSMKSPKRSSRALREAKISIAGDNREEWAFKFGVLQHRPLPPDSHLKQWSLIYSGGALWLCFTVERKRPLPFPGMHAAGLDIGWRRTEEGIRFGILYEPESKTFRELSIDLQKSPEDHNNRMPFRIDMGPNRWDKRNITQLLPDWKPGDAIPNTVVVRRALGSRRSSYKDAAKVLLQKHLGDQLPVWFDKAGSRGLFKLKENFKDVPVVQEIIDDLQKKTEALNAVAGKYTARYTRELEYGQIQIAHDVCRHLQQKGVTRLIVEASFVAKASQKQDNEDPASLKNSQKYRQFAAVSKFVSLLKNIAVKYGIAVEVLSAQNTTRICQYCNHLNPSTEKEIFFCEGCGKQVQQDQNAAVNLSRFGIDPELAEMALTFSKD

SEQ ID NO: 25 - protein, 651 aa, Unknown
  Description of Unknown: plants-rhizosphere-carex aquatilis sequence
MTMRVYKFLCLPATAADDHCLREQVRLGARYRRQIALIENRERFLRRALIDYPARDVPVEARGAWWKSEAGKAARDAWHASDEFKALRERVFAGKKRALKAVRDATIEAGAMWGTLGKADDAADFARRTIDKAGLIDENGRTTFVGTDFPPDVGRIAVQFQRQNARIDARTGKTLPAKKSVYADDLIGGEGSWLRIGSVAYSLGAPVDHFRPAAVDAEGRAIDVAGNPGDVIKIGPRAGEAATKGKRFHALAIRVGTVPGTIRPIWAQMHLLLHQSPRTKNRLQLGHDVVKWAVVRRERTGLRYRWYLTLEVEGSVAVTTPHPHPHDAVAVHIGWRQLFDEEGKKAGIRLLTWSATAPLDPNDPASPLWGQLVIPEDVLGVKPWADSIHSIRDQNQDVLRDMILAYARSLPATSWLREESRHMHNWRAPSKYVRLHRQWRDQRIHGDQPAFAALEAWSKQDVHLLHREVPSLERMQRQVEGRVTAVAVQLAKRYGVVARDDFDVTGLVEKDDQHDEDEQKLRKKTARRVNILGPGRARARVGYFAKKYGSVDLEVDAAGGTLDCAACGHHRDVSREDRVQRVIRCENCGHAEDQDITMSRNLLAAASAVARGESGWPLDPKVPAPSTKKKAPARRNRRKDQQPLAPSPATP

SEQ ID NO: 26 - protein, 651 aa, Unknown; identical to SEQ ID NO: 25
  Description of Unknown: plants-rhizosphere-carex aquatilis sequence

SEQ ID NO: 27 - protein, 651 aa, Unknown; identical to SEQ ID NO: 25
  Description of Unknown: plants-rhizosphere-carex aquatilis sequence

SEQ ID NO: 28 - protein, 651 aa, Unknown; identical to SEQ ID NO: 25
  Description of Unknown: plants-rhizosphere-carex aquatilis sequence

SEQ ID NO: 29 - protein, 651 aa, Unknown; identical to SEQ ID NO: 25
  Description of Unknown: plants-rhizosphere-carex aquatilis sequence

SEQ ID NO: 30 - protein, 651 aa, Unknown; identical to SEQ ID NO: 25
  Description of Unknown: plants-rhizosphere-carex aquatilis sequence

SEQ ID NO: 31 - protein, 651 aa, Unknown; identical to SEQ ID NO: 25
  Description of Unknown: plants-rhizosphere-carex aquatilis sequence

SEQ ID NO: 32 - protein, 505 aa, Unknown
  Description of Unknown: plants-rhizosphere-spartina alterniflora sequence
MPTLVYKYGARSSQDSALLDQMRLGRRYYNALVEAENDRRRAAWGGDHPPAPDDPHETCVCDECVQEPNPEHTSCRCKTCKAHWKAVRQRVLDTPPLDVKPLYAEARAQGLHWGTCLAIGQAFSAAWTKTSALRTVRFRSWRQGDVAAVQIQLTNKPDSLVRLCKAPDARTGRRARNGLGRHTVQIRIGSNADRSPIFCDPIRIEKHRELSGRIAWVHVRRKRIADREVWSVAFTCNEADARTDEAHEGVVAVDVSWRKLPDGSWRLGYAQDDAGNVSELLLPPEWAERAERAERIRSHRDARLNELKAKMPLLAHTKSCRKAVEKLLRLGVLPLELSEWIARDTHLWQYETGCWRRSASRRRAALQEWVRMLRQTYAIVIVKDSQHKLMKEKHDLPQPAQRQGQHAAPGETVENLRRVFGMTGMKVVSAVDTTTTCVQCGHVTPINGQRFVHCERCGDRRDRDHASTRNMLQLYKNGAYKSPTARKTTSRFAKKHTKKDVPPEC

SEQ ID NO: 33 - protein, 651 aa, Unknown; identical to SEQ ID NO: 25
  Description of Unknown: rhizosphere metagenome sequence

SEQ ID NO: 34 - protein, 651 aa, Unknown; identical to SEQ ID NO: 25
  Description of Unknown: rhizosphere metagenome sequence

SEQ ID NO: 35 - protein, 651 aa, Unknown; identical to SEQ ID NO: 25
  Description of Unknown: rhizosphere metagenome sequence

SEQ ID NO: 36 - protein, 651 aa, Unknown; identical to SEQ ID NO: 25
  Description of Unknown: rhizosphere metagenome sequence

SEQ ID NO: 37 - protein, 651 aa, Unknown; identical to SEQ ID NO: 25
  Description of Unknown: rhizosphere metagenome sequence

SEQ ID NO: 38 - protein, 517 aa, Unknown; identical to SEQ ID NO: 2
  Description of Unknown: sediment metagenome sequence

SEQ ID NO: 39 - protein, 571 aa, Unknown
  Description of Unknown: soil metagenome sequence
MMCFQYWAEPVDETSKALLAHQLREGAMYRRILATLENRARFLLGGLMRLTKEDRAPWRARIYVAHAQAVRDERAAASARGLTWGTYLAIEDALDQSQRTKARGAMLGTFAPRDEGIVGVHIQNREISARAVVGGEDKYVRIDPELVGKPTLRSRREGTAMGARRLNILSIRVGSKGPRGLEPVWARFYVLMNRPLPDASLKWVKLRCRRIGTTYRWQANFVVGAPCVGTPNPDRLPGVGIDLGWRKRADGIRIAYYADTEGRHGELVIPQHVIARDAKSDSLRRIRDQARNQIQAVLADLRTRLASRKAVSSIPPVEGTAVTPAWWRWTCGLAVGMALLTPTEAWFLEQTQFLHAWRKVSRLVWLHRQWRERRFAGDEDAFLLMDDYIRQDRHLFNWEAYNRRRLTAEVEGRVREFAVSLAKRYDMIAVEEAGIVSKLVQKQAEPEPRDEALRAVAAKRMHACSPASVREQIVRFGGKYGAKVMQIDPANTTKTCDACGQIRAPADPEQLVLGCEHCGHVQDQDHSAARTLLASGLVMALEGAATKGRTPRKMGARRTRKKAQVEIARDA

SEQ ID NO: 40 - protein, 582 aa, Unknown
  Description of Unknown: soil metagenome sequence
MAVADPEGIEIMMCFQYWAEPVDETSKALLAHQLREGAMYRRILATLENRARFLLGGLMRLTKEDRAPWRARIYVAHAQAVRDERAAASARGLTWGTYLAIEDALDQSQRTKARGAMLGTFAPRDEGIVGVHIQNREISARAVVGGEDKYVRIDPELVGKPTLRSRREGTAMGARRLNILSIRVGSKGPRGLEPVWARFYVLMNRPLPDASLKWVKLRCRRIGTTYRWQANFVVGAPCVGTPNPDRLPGVGIDLGWRKRADGIRIAYYADTEGRHGELVIPQHVIARDAKSDSLRRIRDQARNQIQAVLADLRTRLASRKAVSSIPPVEGTAVTPAWWRWTCGLAVGMALLTPTEAWFLEQTQFLHAWRKVSRLVWLHRQWRERRFAGDEDAFLLMDDYIRQDRHLFNWEAYNRRRLTAEVEGRVREFAVSLAKRYDMIAVEEAGIVSKLVQKQAEPEPRDEALRAVAAKRMHACSPASVREQIVRFGGKYGAKVMQIDPANTTKTCDACGQIRAPADPEQLVLGCEHCGHVQDQDHSAARTLLASGLVMALEGAATKGRTPRKMGARRTRKKAQVEIARDA

SEQ ID NO: 41 - protein, 571 aa, Unknown; identical to SEQ ID NO: 39
  Description of Unknown: terrestrial-soil sequence

SEQ ID NO: 42 - protein, 582 aa, Unknown; identical to SEQ ID NO: 40
  Description of Unknown: terrestrial-soil sequence

SEQ ID NO: 43 - protein, 691 aa, Unknown
  Description of Unknown: terrestrial-soil sequence
MRVYKFLCIPATAADDRALRDQVYLGSRYRRQSALIENRARVLQRGIADRPALNVPEKDRSAWWKSEEGKAARDAWYASDECKMLREIIFAEKKRALKAARDAAIEAGTMWGTCGKADDAADFARRAVDKNGLIDEDGQTTFVDTHFPADVGRIAVQFQRGNERIDTRTGKKIPAKKLIYADDLIGDEDTRLRIGTVAYALAEPVDGFRPAAIDAEGKAIDVYTRGLSEREQDLLARDQREEAIAAYAARTPASIDPSGNICKTPEQKAVTKIVRWERGERDEKGKRYHSLAIRVGTMPGTIRPIWAHLHVMLHQSPRSKNQLVLGHDVVKWAVIRRERTGLRYRWFLTLETEGDVAVTSPHPQPHDAIAVHIGWRQLFSEAGDPAGIRVLTWSASAPLDPDDPRSPREGQLVLPQEVVDQKPFADRIHSTRDKNQDVLRDMILVYARSLPTSSWLRVEAAHMHQWRAPRKYVRLYCQWKEQRIHGDQAAFAALEAWIKQDRHLLHREAPSIERMKRQIEGRVTALAVQLAKRYGVVASDNIAVGELVKKDDRHDEDEQKLRKKTARRVNVVAPGEARALVRYFAKKYGCVGLELDAAGGTIDCDACGHRRDVAREDRVQRMIRCENCGHVEDQDLTMSRNLLSGASAVARGESGWPLAPKVPAASTKKRATVRRNRRRGQQPLASSVGTP

SEQ ID NO: 44 - protein, 404 aa, Unknown
  Description of Unknown: terrestrial-soil sequence
MIEDAFAMACKDRSVLRLVKFRSWRDGGVAAVQIQRAAWERDGGASMYRTRAQVDNRTGRRTKHGGRQTLEIRIGSDGRNPIWSEPVRYEQHREAVGRPTWIKVSMKYRGDLEVWSVVVTCADVPPRPASEEAQRGVVAVDVGFRRVGDDIRIAYARDDRGKVSELLMDARWRELCNRADRIRGHRDDNFNALQEADSENLFSLTKSANGARQKIERLVREGEEVSQEMRAWMHRDRHLSQYEDGCRRRSVNARKDAMRKWARELRRNYSQLVLSKTAVKKMKENAKDDGLPKPARRQGQNAAPGELLDWLVMVFGRAEVAIVKPIHTTDTCVSCEHVNDHGPETIVVCEECGAALDRDEASTRNMMDLWVNGECEKPTARKASAKFAKKHKTEDKDDNASPAA

SEQ ID NO: 45 - protein, 559 aa, Unknown
  Description of Unknown: terrestrial-soil-arctic peat soil sequence
MAFVRETILPEIDAFNDALGRSKAKIKHPAKLKTEMPGIDGLWHFVGQLRTRIEKGRAVPEGLLEKIIAFAEQFKPDYTLLNEFLNNYRDIAAKEATALGLLRYEIRPTVNGFKAVLDRRKTTKAAWSEGWPLIKYPDSPKAANWGLHYYFNMAGLDSAQIESPKGVPGLTFGPHLKSSDTGHELLTGLAATKRSLRAAEISISGSNHERCTFRFAVLYHRPLPAGSHLKEWKLIYADGALWLCLTVELQHPVPVHSPLAAGLDVGWRRTEEGLRFGTLYEPATMSFRELSIDMQKSPKDHKDRMPFRIDIGPTRWEKRNILQLLPDWKPGNPIPSSFETRTAVQSRRDYYKDTAKILLRKHLGESMPAWIDKAGRRGLLKLAEEFKEDQVVQNILGTWMQQDEQVGKLVSMYLARSTKRLEYGHAQVAHDVCRHLLDKGVHRLIVETSFLAKVSQRHDNEDSEGLKRSQKYRQFAAVGKFVAVLKNTAIKYGIVVEELSTINTTRICQYCNHLNPGTGKEYFTCEKCERQIKQDHNAAVNISRFGCDPELAEMAASAG

SEQ ID NO: 46 - protein, 733 aa, Unknown
  Description of Unknown: terrestrial-soil-bog sequence
MIDRLTFDGKCVYVHLAAISLKATKVFTHGGWVFDLAAHTVAFKDIPPVALPENLTLSDGASLTFQLVAPDGTLRKQVRSGVLKSNDKQPGILRIAGRSKTPANFSAADGWKIEVFKYRAYFTHPGLKTEAGLPEWLQNSIKRQRDFWNRMAWLCRDARRRCSPVPTEEIVAFVQESVLPAIDEFNNSLGIARSKEKIKHPINLKIEMPGLDAVWKFVGELRKRIAKNRGVPDGLLEKVVAFAEQFKADYGPLNEFISNLESIAKIESTALGLRQFEIRPTINSFKAVLDRRKTLKSAWSDGWPHIKYADSPRAADWGVYYYFNKSGVDSARLEAGPGVPGLTFGRPLKPADTGHKSMKSPKRSSRALREAKISIAGDNREEWAFKFGVLQHRPLPPDSHLKQWSLIYSGGALWLCFTVERKRPLPFPGMHAAGLDIGWRRTEEGIRFGILYEPESKTFRELSIDLQKSPEDHNNRTPFRIDMGPNRWDKRNITQLLPDWKPGDAIPNTVVVRRALGSRRSSYKDAAKVLLQKHLGDQLPVWFDKAGSRGLFKLKENFKDVPVVQEIIDDLQKKTEALNAVAGKYTARYTRELEYGQIQIAHDVCRHLQQKGVTRLIVEASFVAKASQKQDNEDPASLKNSQKYRQFAAVSKFVSLLKNIAVKYGIAVEVLSAQNTTRICQYCNHLNPSTEKEIFFCEGCGKQVQQDQNAAVNLSRFGIDPELAEMALTFSKD

SEQ ID NO: 47 - protein, 559 aa, Unknown
  Description of Unknown: terrestrial-soil-bog sequence
MAFVRETILPEIDAFNDALGRSKAKIKHPAKLKTEMPGPDGLWNFVGQLRTRIEKGRAVPEGLLEKIIAFAEQFKPDYTPLNEFLNKYHNIAAKEATDLGLLRYEIRPTVSGFKAVLDRRKTTKAAWSEGWPLIKYPDSPKAANWGVHYYFNTAGLDSAQIESPKGVPGLTLGPHLKPSDTGHELLTGLAATKRSLRAAEISISGPNHEQCTFRFGVLYHRPLPAGSHLKEWKLIYADGALWLCLTVELQHPVPVHSPLAAGLDVGWRRTEEGLRFGTLYEPATMSFRELSIDMQKSPKDHKDRMPFRIDIGPTRWEKRNILQLLPDWKPGNPIPSSFETRTAMQSRRDYYKDTAKILLRKHLGESMPAWIDKAGRRGLLKLVEEFKEDEVVQNILGTWKQQDEEVGKLVSMYLARSTKRLEYGQAQVAHDVCRYLHDKGVHRLIVETSFLAKVSQRHDNEDSEGLKRSQKYRQFAAVGKFVAVLKNTAIKYGIVVEELSAINTTRICQYCNHLNPGTEKEHFTCEKCERQIKQDHNAAVNISRFGCDPELAEMAASAG

SEQ ID NO: 48 - protein, 645 aa, Unknown
  Description of Unknown: terrestrial-soil-tropical peatland sequence
MATKVLKFYCVPASARDNQLLCEQVKLGSMYRRDLAWIENRARELRRAIADWPARDVPIEKRSEWWKSDVGRAASKAWHESDECKRLKKSITDGQIQAATAARKKARRFDTAWGTCGLAAEAAEAARVALEKEFGLIDKETGQTTFVNTKFPSDEGRVGVQFQRDTDKIDEETGEVIPAKKPTIYADELIGGSHNFCRIGSARYSLLDRVDGFQPAALDASGAPIDSFGYKSKQPKGKRFHLLQIRVGTVDKRSTAYPFDLDPDKGEPIWAKLHVLSHQKTKRPQTLPHERVKWVFVQRVRCALRYRWSVCFVIEDSVVQKPHEQPNDRVAVDLGWRQLFDESGTPAGIRLLYWMATSPLDLNDPSSPVEGQLVIPQHVVDRKPFSSQLESNRTKNREAMQAMLLAYLQSVSSATWLAKRTAQLASWKKPSKFVLLLNEWRKNRIAGDQAAFAALEAWNKQDAHLYLWSAPNITKMQRQIQGRVDQFAVQLARRYGIVIVENFKLPDVIEKKDLQEQDQDAQKLRKKNARRVNVVAPGRARAALKRFATKYNSHYIEEESAFTTVDCASCGHRREFDLKNARAQLLLACDNCGVVEDQDRTAARNLLAGASAIARGENGWPLEAKVSKASKKKVVLRRTRKRIVV

SEQ ID NO: 49 - protein, 616 aa, Unknown
  Description of Unknown: terrestrial-soil-tropical peatland sequence
MYRRDLAWIENRARELRRAIADWPARDVPIEKRSEWWKSDVGRAASKAWHESDECKRLKKSITDGQIQAATAARKKARRFDTAWGTCGLAAEAAEAARVALEKEFGLIDKETGQTTFVNTKFPSDEGRVGVQFQRDTDKIDEETGEVIPAKKPTIYADELIGGSHNFCRIGSARYSLLDRVDGFQPAALDASGAPIDSFGYKSKQPKGKRFHLLQIRVGTVDKRSTAYPFDLDPDKGEPIWAKLHVLSHQKTKRPQTLPHERVKWVFVQRVRCALRYRWSVCFVIEDSVVQKPHEQPNDRVAVDLGWRQLFDESGTPAGIRLLYWMATSPLDLNDPSSPVEGQLVIPQHVVDRKPFSSQLESNRTKNREAMQAMLLAYLQSVSSATWLAKRTAQLASWKKPSKFVLLLNEWRKNRIAGDQAAFAALEAWNKQDAHLYLWSAPNITKMQRQIQGRVDQFAVQLARRYGIVIVENFKLPDVIEKKDLQEQDQDAQKLRKKNARRVNVVAPGRARAALKRFATKYNSHYIEEESAFTTVDCASCGHRREFDLKNARAQLLLACDNCGVVEDQDRTAARNLLAGASAIARGENGWPLEAKVSKASKKKVVLRRTRKRIVV

SEQ ID NO: 50 - protein, 580 aa, Unknown; identical to SEQ ID NO: 5
  Description of Unknown: wetland metagenome sequence

SEQ ID NO: 51 - DNA, 37 bp, Artificial Sequence
  Description of Artificial Sequence: Synthetic oligonucleotide
ccaaccaatgccagcgcgacggcttatgagtcgcgac

SEQ ID NO: 52 - DNA, 36 bp, Artificial Sequence
  Description of Artificial Sequence: Synthetic oligonucleotide
ggtaaaacacctgcgagatggtttatgaatctcgac

SEQ ID NO: 53 - DNA, 21 bp, Artificial Sequence
  Description of Artificial Sequence: Synthetic oligonucleotide
agtgcatcgaacagatgcaac

SEQ ID NO: 54 - DNA, 31 bp, Artificial Sequence
  Description of Artificial Sequence: Synthetic oligonucleotide
aatgccagcccaacggcctagaagttgggac

SEQ ID NO: 55 - DNA, 37 bp, Artificial Sequence
  Description of Artificial Sequence: Synthetic oligonucleotide
gtaacagtggcatcacagtgcattgaatagatgcaac

SEQ ID NO: 56 - DNA, 36 bp, Artificial Sequence
  Description of Artificial Sequence: Synthetic oligonucleotide
gtagcaatggcagcgcatcgccttttaagatgcgac

SEQ ID NO: 57 - DNA, 25 bp, Artificial Sequence
  Description of Artificial Sequence: Synthetic oligonucleotide
gtagcaatggcagcgcatcgccttt

SEQ ID NO: 58 - DNA, 24 bp, Artificial Sequence
  Description of Artificial Sequence: Synthetic oligonucleotide
ggatcaatgcttgctcgatggctt

SEQ ID NO: 59 - DNA, 37 bp, Artificial Sequence
  Description of Artificial Sequence: Synthetic oligonucleotide
ccaacaatgctagcgagacggcttcatgatctcgacg

SEQ ID NO: 60 - DNA, 36 bp, Artificial Sequence
  Description of Artificial Sequence: Synthetic oligonucleotide
gtagcaatggcagcgcatcgcctttcaagatgcgac

SEQ ID NO: 61 - DNA, 37 bp, Artificial Sequence
  Description of Artificial Sequence: Synthetic oligonucleotide
gtcgcaatctttgccgagtcaagcatgaactcggacc

SEQ ID NO: 62 - DNA, 36 bp, Artificial Sequence
  Description of Artificial Sequence: Synthetic oligonucleotide
gtattcacgcttgcgaggacggattgcgtcctcgac

SEQ ID NO: 63 - DNA, 36 bp, Artificial Sequence
  Description of Artificial Sequence: Synthetic oligonucleotide
gtacaacgaactgaaagtgcgccgaacaggtgcaac

SEQ ID NO: 64 - DNA, 36 bp, Artificial Sequence
  Description of Artificial Sequence: Synthetic oligonucleotide
ggcacgatcgatgcgagacctcgcggtggtctcgac

SEQ ID NO: 65 - DNA, 36 bp, Artificial Sequence
  Description of Artificial Sequence: Synthetic oligonucleotide
cccggaatgctagctcgatggctattcaatcgagac

SEQ ID NO: 66 - DNA, 34 bp, Artificial Sequence
  Description of Artificial Sequence: Synthetic oligonucleotide
taaaacacctgcgagatggtttatgaatctcgac

SEQ ID NO: 67 - DNA, 36 bp, Artificial Sequence
  Description of Artificial Sequence: Synthetic oligonucleotide
ggatcaacctctgcgggaacgagcgtggttcccgac

SEQ ID NO: 68 - DNA, 36 bp, Artificial Sequence
  Description of Artificial Sequence: Synthetic oligonucleotide
gtagcaatcgatgcgagacctcgcactggtctcgac

SEQ ID NO: 69 - DNA, 36 bp, Artificial Sequence
  Description of Artificial Sequence: Synthetic oligonucleotide
atgacaatgccagcccagcggcctgaaagctgggac

SEQ ID NO: 70 - DNA, 32 bp, Artificial Sequence
  Description of Artificial Sequence: Synthetic oligonucleotide
tacggcaccacagtgcatcgaatagatgcaac

SEQ ID NO: 71 - DNA, 31 bp, Artificial Sequence
  Description of Artificial Sequence: Synthetic oligonucleotide
gtgtacggcaccagagtgcatcgaatagatg

SEQ ID NO: 72 - DNA, 36 bp, Artificial Sequence
  Description of Artificial Sequence: Synthetic oligonucleotide
gtgttcacgcttgcgaggacggattgcgtcctcgac

SEQ ID NO: 73 - DNA, 1387 bp, Unknown
  Description of Unknown: terrestrial-soil-tropical peatland sequence
tctaatattctctatgccgaagccggttcgcgatggatcaaccgttgggagagtggccaacttgaagctgagatgaagcgtgcaatcgggaaaatgtaccagcgtatgcgtctcgcggagaaagtcattgcacccaaaagaaggcgttaagtaaattgtgagtgatctaccgccctgccgcgttcaaagcattcgcgcaagcatgaacgcgctgtactggacgctgatcgtggcaatcctggttgggatagcggccgtcagcttcacgcttggcgtcaagcgtatgtacaattgggcgcacgctccgcatgctccgtccgttgtggattgcggacgagattacgacgacgtgcgatgccagcttttgtacctagaggacgtttacttgtgcgtgctgaaagacactaggcacgagccttcggaaggctccggtcaaatacaaacgctactgatgcacgtcagaagatcggcacagaggtaggcgcgttggcgccttgctcttgacaagtgcgcgataacaacgtactctcgacaagcgaataagtggcagcagacgggcgttatagacccgaaaggaaaaccacgtggctaccaaagtcttgaagttctattgcgtacccgcctctgcccgagataaccagctcctctgcgaacaagtgaagctcggctcgatgtacagacgcgatctcgcttggatcgagaatcgcgcacgcgagctgcgccgtgccattgccgattggcctgcgcgtgatgtacccatcgaaaagcgttcagagtggtggaagtctgatgtcggtcgcgcggcctccaaagcatggcacgaccaggatcgtacagctgcacgcaatctcctcgccggtgcgagcgccatcgcgcgcggtgagaacgggtggccgctcgaagcaaaggtttcgaaggcttccaagaaaaaggtggtgctacgccgcacgcgtaagcgcattgtggtgtgaccgctcgcaagagcggtgtgaagtaactggttttgctattgatctctgacaacctcgacaaagcgcctgactagccgtgacttcctatttgcctagggctctacacgagcggattacgctcgtaaacgaggttttgatgcttgcacgggcggattgcgctcgtgacctcacgctcctcggtcacttatttccgttgcatcgcactgcccgcaatcagcacgagccctagcccgatcacacccaacgcgaccacgacgatcaagccttcaatcccaacgttcgcgtagcgcggcgatcgtcagttccaacgggtactgatcgaatccgtgccagccgtagtggccagcggcatcccaaacggcgtttgcacgctcactcgcagtcttcaagttctttgcgtcataccgttctaggtc

SEQ ID NO: 74 - DNA, 684 bp, Unknown
  Description of Unknown: terrestrial-soil-arctic peat soil sequence
tctcacaccccggagtcccaaccgaccccgagattcccgaatggctcaaggcgtcgattgcgcgacagagatccctctggaatcggttggcatacttctgtcgcgaagcaagacggaagtgctcgccagcgcccacggctgaaatagtggcgtttgttcgagggaccattcttccggagatcgatgcgttcaatgacgctctcgggcggtcgaaggcaaagatcaagcatcctgccaagctcaagacggagatgccggggatcgatggactgtggcacttcgttgggcagctccggtgcaaccaccttaaccctggcaccgggaaagagtacttcacctgcgagaaatgcgagcggcagatcaaacaagaccacaatgccgcggtcaatatctcgcgcttcggctgtgatccagaactggcagagatggccgcctctgctggctgagtctttacctatagctctgctcgaatctcaagcgagcatttattgctcgggaggttcgcgcaggttgttcccgcacataataaaggagattgtgaaatatcaagggcgatgtcgtcaaatcaaatactctgcggggagggttcgcgcaaaccattccgtagatcattgcggtcgaataagttacagtgaaggaatccatgcgattgaaaactattgtagtcgcgctggtgctgcgtac

SEQ ID NO: 75 - DNA, 1081 bp, Unknown
  Description of Unknown: aquatic-non marine saline and alkaline-hypersaline lake sediment sequence
ccacaacaaggtgttcaagcagctcgccgaagaactcgggctcgccgtcgagaaacagggtgcccgggggttggcggccacctccgtgcccgcggaaaccgcgaagcgctggcagaagaccatcaaagaactcgacaaggccatcaagacgtttcggttcgccgagggccccaggggcggcagcaaaggtgagaaccgccagctgctggccatctgccagtgccgccgcaagatccggttgtcccgggaggcctacgacgctggccccatcatctgccgggtatgtgaacgacacttcgagataaaggagtagaaaaatgaaagtattcaagtacggtgctcgacccgtaaaccaggagagcctcattcgtgatcaaatgaagctcgcccgaaactactacaacaagctcgttgaaacggagaacaagagacggcaacaggcctggggcagcgaaaagcctcctcctgcgaccatgaagaggtaacacctacgagacggtttatgagtttcgactatactactgataatctgccccaacttgtctcatggataaaacaccagcgagatggtttataaatctcgacagactcgcggatggaagagaactcgcgacactcgcggggtagaacaccagcgagatggtttatgaatctcgacaggtcgaagtagataccaaacctctaccataaccttacgtaattcttgacttttatttgcacttgcgtaagtgaatacccgaacagtacaatcgtctacataccagcggcttagaggagccagaaaggagaactagatgtcagcagccttattagccccgctttggaggaagccgtacatcctcgggggcaacgccaaggtcaccttggtgtctaccaagtccgagtgccggttcacattccgcatccgcgccaaggaagtcgagaaagatcgcgttctccacttcgtcagcgtgctgacggggcctgagaacacgaccgactactccttcctgggaaccatcttcgacggcgacaagttcgttcacggtaagaagtcgaagatcacggccgacgcgcccagcgcgaaggccttctcctggct

SEQ ID NO: 76 - DNA, 886 bp, Unknown
  Description of Unknown: rhizosphere metagenome sequence
caagtcactcatcgtgatctttctgcgcttcatctcggcgcggagccacgactcttcggtgtcggtgacgcgcgcaccgatgtagtggctgagtttctccgcggcttgttgcttcggctcgaacattgcgtcttgcaaaacgtctatcatcctgttagctgttcgtcaatgcaacaacagcacgtgcgacagcggggcgcccaacaatgacgatgcgcgtgtacaagttcctctgtctcccggcgacggccgccgacgaccattgcttgcgcgagcaggtgcgcctcggcgcgcgctaccgccgacagatcgcgctcatcgagaaccgcgagcgcttcctccggcgcgcgctcatcctcgccgccgcgagcgccgtcgcgcgcggcgagagcgggtggccgctcgaccccaaggttccggcaccttcgacgaagaagaaggccccggcgcggcggaaccggcggaaggaccagcagccgctcgcgccgagccccgcaacgccgtaggatcgttcgttccatgcttatccggttaacaccccaaacgtgatcagggagacatcaaatggcatcgcgactcgaacgtgaacttaaaatcatccgctccgaaatgggcgagcttctttccgcctctctgggcaagcgaccgtccgtgatcaacgtcggcggaacgattcaagaactcaccccaacggaagctctcgctgaatggcgagcctctgcgaagcgcgccgagcgaaagatcaaggagatccgtcgcgcccgcgaggggtgacaaccggataagcatggttcgttctctgacaatcgaaacctacggattgtcctcggcggagggattcgggttcgtcggcacgatcgcgggcgcgctatggtgaggtcatggc

SEQ ID NO: 77 - DNA, 1467 bp, Unknown
  Description of Unknown: aquatic-freshwater-groundwater sequence
cgcatgcgcctgatgcagatcgagtgggagaagcagccgaagttcacgctcggcgcctgccggccgcccggggtgccgcacacctggccgcccaagtcggccgggccggcctggatggtcgtgtttcgggtgaaggggacgagcaaatgatgaaagtattcagttttggtgctagggctcggtcacttgacgccgaggtccgcgagcaaatgcgcctcggtcgagagtgctataacgcgctggtcgaagtggaaaacgctcgccgtcacttggcctggggtggggacatccccccaaagccaccgcatccgctaccactgacccaggatggcgacgagaacgacgatgagactgcgtggctagatcgcgacctcgtaagcactcgtaacatgctggttgcctacgctgcggaggagaggcggcgaccaaccgctcgcaaaaccgctgctagattcgggaaacgacacaagacctcgacgagcctcgacaatgccagcccagcggcctagaagttgggacaagttggctccgactgacaatgcccacgaagtcgggcctcgacaatgccagcccagcggcctagaagttgggacgccgcccctgtcctgcggctcctcgtccgtcgccgttcgacaatgccagcccaacggcctagaagttgggacaacccgtccatgtagtcgcgggccgcttcgctgactgatgatgccagcccaacggcctagaagttgggacatgtttagacgcgccacccagcccgctcccgatgcggctgatgatgccagcccaacggcctagaagttgggacgacgatgtaccaagagtgcctgatgatgccagcccaacggcctagaagttgggaccgggtgcctcggcccacagcttcgccggcaacgcggtcgacaatgccagcccaacggcctagaagttgggaccatggccaggatgctgatgatgccagcccaacggcctagaagttgggacagaaggccaccgtcgtcggtgggcaggtcgacccggcacctgatgatgccagcccagcggcctagaagctgggactgcgatccgtcgtggtccgccatcgagatcgatgccgatctgatgatgccagtccagcggcctagaagctgggacctgtcagcactgtggcctgacccatccgtgcctagctatcgacaatgccagcccagcggcctagaagctgggactaccacggtgggcaccgtgctattcattggctacccaatgaatatggtgtatagcattatagtcttagaaaaaaatcttagtaaaacgcggcgcaaaggacggtgactagtggacgaccccagactggaagtagcggcccaggcaatcgacaggccggaggcccaggtcaaggagctgtcggacgcgctgcccgacgccaaatacttgagcaatctcgcggcgcggctgaaggacgttcccaagacgtatggcgtgttc

SEQ ID NO: 78 - DNA, 214 bp, Unknown
  Description of Unknown: terrestrial-soil sequence
aatggaatagcccggacggtacttgacacgtgtagaaaatgctactatttatgtagtaatcattatgccaaccccatttttccagccaggcgatccgcgttgccaccgcgccggcagacccaaggggacagcgctcaagaaaatgcgcaagatggctgccgaggtgctaggcgaggagctggaaacgccgactgggcgtatgacccgcgcaaaa

SEQ ID NO: 79 - DNA, 543 bp, Unknown
  Description of Unknown: soil metagenome sequence
cccgtggtcctgacgttgttcgggggatatcgggatgaccatcccgagagcgtgctggggctccacgcgatgggcgtggcccgcgcgctctactggctcgcgggcgtccgcaagctcgccgactggcgcgcggatgttcgcccgcgctgagtctctgcggaggcgagtttggcctccgacaccgagtccgcacgttatcaccgggttggcggtcgccgacccagaagggatcgagatcatgatgtgcttccaatactgggccgagcccgtcgacgagacgagcaaggcactcctcgctcaccaactccgcgagggcgcgatgtaccgccgcatcctcgccacgctcgaaaatcgcgatcaagaccacagcgccgcgaggactctgctcgcgagcggtctggtgatggcgctcgaaggcgcagcgacgaagggtcgaaccccgcgaaagatgggggcgcggcgtacgcgcaagaaggcccaggtcgagatcgctcgcgacgcgtgatacaagttcgctctctgacaaccgaataggtcatcgca

SEQ ID NO: 80 - DNA, 676 bp, Unknown
  Description of Unknown: terrestrial-soil-bog sequence
tccctctggaatcggttggcatacttctgtcgcgaagcaagacggaagtgctcaccagcgcccacggctgaaatagtggcgtttgttcgggagatcattcttccggagatcgatgcgttcaatgacgctctcgggcggtcgaaggcaaagatcaagcatcctgccaggcttaagacggagatgccggggcccgatggactgtggaacttcgttgggcagctccggtgcaaccaccttaaccctggtactgagaaagagcacttcacctgcgagaaatgcgagcggcagatcaaacaagaccacaatgccgcggtcaatatctcgcgcttcggctgtgatccagaactggcagagatggccgcctctgctggctgagtctttacctatgccctgtgcggatctcaagcgagcatttattgcttgggaggttcgcgcaggctatttccgctcataacaaaggagattgtgaaatatcaagggcgatgtcgtcaaatcaaatactctgcggggagggttcccgctaaccattccgtagatcattgcggtccaataagttacagtgaaggagttggattttcacgctgccgcttggaaattgagtttgtagcggtatccgcgcccaatattttgcgcagaatcagactcaggctaaaagtcttctcccgtgagaggcacg

SEQ ID NO: 81 - DNA, 1137 bp, Unknown
  Description of Unknown: marine sediment metagenome sequence
tctcatgtacgccaccgtcgatcctcgggcgaacggagggtttatggtgacctacggttggcgaaacaaagatggaaccgcggaggtgatgcgagagcacttctctgacctcgaagatgccaaggttgatgcggcagactttatgctctgccgcggggactgggaagaatgagcagggccaaatgcccaaaaaagcgcttgttggctcacgcccgaggcgaagacgagtgctggctatggccaggagcggactctggcaacggctacgggaggatctcagtggacggcaaaacaagagcgactcacatcgtggcctacgagctgtttaccggtactcgtgtgccgcctggaatggtgctcgaccatcagtgtcgaaatcgactgtgctacaacccgagatgcctcaagcccattccaggcattgtcaacacgctcatcggtgagggacctactgcagccaatgcgctcaagacgcattgctgtcgcggccacgagttggccggtgagaatctcatcactaggactcgcgaaggtcggcggccaagtcgtgagtgtcgtgcctgccgcaggatgcgcggcagagcgcaggagatgtgcgtatgagcaagtgcgagggctgcggggaagatcatctcgtcctaggcgcttgcatactgaaggcagcgatctacgaggctccctgtatctactgtcatgcgcggccaggagaactgtgcgtaacctgcaccggcaaggagagcccgcagtggcacatgcagcgcgtcggggctggccacacgctactagtcgcgagaggaacaccgtgccttgcttctcgccatatacagagaatgcgcggaaaccgtcgcaataaagggcacaccagacagaactggcatcgcaacaaggaacgactgagtcatggaaagagagtgaaataatatggctacacgcgtctacaaattcggagcccgctcaccaggtgaggccactcttctgcgcgcccagatgaaactgggccgcgagtactacaacgccctcgtcgaggtcgagaataagcgccggcaaaaagcctggggcgccgagacggtgccagcaccaccgcacgaggattgcaagttgcccaagtgccccgagtgtcgcgaccattggcgagcg

SEQ ID NO: 82 - DNA, 35 bp, Artificial Sequence
  Description of Artificial Sequence: Synthetic oligonucleotide
tcgtctgtcgtaaaacaacctttagaatttttttc

SEQ ID NO: 83 - DNA, 35 bp, Artificial Sequence
  Description of Artificial Sequence: Synthetic oligonucleotide
cagttcggtgatatacgggatctctttctcaaaca

SEQ ID NO: 84 - DNA, 35 bp, Artificial Sequence
  Description of Artificial Sequence: Synthetic oligonucleotide
ggtgatatacgggatctctttctcaaacagttttg

SEQ ID NO: 85 - DNA, 31 bp, Artificial Sequence
  Description of Artificial Sequence: Synthetic oligonucleotide
aatgccagcgcgacggcttatgagtcgcgac

SEQ ID NO: 86 - DNA, 31 bp, Artificial Sequence
  Description of Artificial Sequence: Synthetic oligonucleotide
aacacctgcgagatggtttatgaatctcgac

SEQ ID NO: 87 - DNA, 32 bp, Artificial Sequence
  Description of Artificial Sequence: Synthetic oligonucleotide
aatgctagcgagacggcttcatgatctcgacg

SEQ ID NO: 88 - DNA, 52 bp, Artificial Sequence
  Description of Artificial Sequence: Synthetic oligonucleotide
gaacaccagcgagatggtttatgaatctcgacaggtcgaagtagataccaaa

SEQ ID NO: 89 - DNA, 67 bp, Artificial Sequence
  Description of Artificial Sequence: Synthetic oligonucleotide
atgaagaggtaacacctacgagacggtttatgagtttcgactatactactgataatctgccccaact

SEQ ID NO: 90 - DNA, 82 bp, Artificial Sequence
  Description of Artificial Sequence: Synthetic oligonucleotide
atggtttataaatctcgacagactcgcggatggaagagaactcgcgacactcgcggggtagaacaccagcgagatggtttat

SEQ ID NO: 91 - DNA, 77 bp, Artificial Sequence
  Description of Artificial Sequence: Synthetic oligonucleotide
ggtttataaatctcgacagactcgcggatggaagagaactcgcgacactcgcggggtagaacaccagcgagatggtt

SEQ ID NO: 92 - DNA, 58 bp, Artificial Sequence
  Description of Artificial Sequence: Synthetic oligonucleotide
aatgcgcaagatggctgccgaggtgctaggcgaggagctggaaacgccgactgggcgt

SEQ ID NO: 93 - DNA, 140 bp, Artificial Sequence
  Description of Artificial Sequence: Synthetic polynucleotide
tatgccaaccccatttttccagccaggcgatccgcgttgccaccgcgccggcagacccaaggggacagcgctcaagaaaatgcgcaagatggctgccgaggtgctaggcgaggagctggaaacgccgactgggcgtatga

SEQ ID NO: 94 - DNA, 59 bp, Artificial Sequence
  Description of Artificial Sequence: Synthetic oligonucleotide
ctactatttatgtagtaatcattatgccaaccccatttttccagccaggcgatccgcgt

SEQ ID NO: 95 - DNA, 37 bp, Artificial Sequence
  Description of Artificial Sequence: Synthetic oligonucleotide
gtcgcgactcataagccgtcgcgctggcattggttgg

SEQ ID NO: 96 - DNA, 36 bp, Artificial Sequence
  Description of Artificial Sequence: Synthetic oligonucleotide
gtcgagattcataaaccatctcgcaggtgttttacc

SEQ ID NO: 97 - DNA, 21 bp, Artificial Sequence
  Description of Artificial Sequence: Synthetic oligonucleotide
gttgcatctgttcgatgcact

SEQ ID NO: 98 - DNA, 31 bp, Artificial Sequence
  Description of Artificial Sequence: Synthetic oligonucleotide
gtcccaacttctaggccgttgggctggcatt

SEQ ID NO: 99 - DNA, 37 bp, Artificial Sequence
  Description of Artificial Sequence: Synthetic oligonucleotide
gttgcatctattcaatgcactgtgatgccactgttac

SEQ ID NO: 100 - DNA, 36 bp, Artificial Sequence
  Description of Artificial Sequence: Synthetic oligonucleotide
gtcgcatcttaaaaggcgatgcgctgccattgctac

SEQ ID NO: 101 - protein, 541 aa, Unknown
  Description of Unknown: wastewater metagenome sequence
MRTTKTPDYSNKNLSFWCEPVGEMPSVVFEKGRQMNRLWNLLVECHTTFLAKHDGKKGGERTEAYKTEWQPLLKRIYNNEAKSFGLNSDETNFVTDGFKNAIRAGYDQKRPGAGMPTFKARLRSIHIPFCDRNGGRAPAWFFEKPDRRIHLRPILLPDAAKRVIDRGPARGHFTVDGQAISLRANLSQSIPPGALVKRVSLVGKLERPFGWQWKLMFSIAYPPPPPAQSDAACVGVDLGYRRFEDRIRFGMIFDGSRFHELALPLDLTNRRAAKAGKRWDIREIWELESQIGCGVEACKASLKQLPKTDWPEEARGAMQGIAKMRERGLLKVRRLLRDAEITVPELETWWDDYQRLFRKSRHLELQIVATRTHLYRNLALSLARSCAAIAWEGDLSLRDLAESAGKKKKQRKEAIAEGVSAERSPEDRIEEAAQKWRAYVCLSDFRRFLKEAVEKTTAALIDRPAAGTTNTCEECGAPVDTGPDLVLTCANGHRRDQDKGSAKMLFEEIDEGYRQQSAPLSLDLFTDQAVRAIRTLNREMV

SEQ ID NO: 102 - protein, 586 aa, Unknown
  Description of Unknown: terrestrial-soil-tropical forest soil sequence
MIEEKTAKRKNPVRRERLNKDWPIKVYTYDCWPQEKPLKALWDTAHEMRRLWNDFTAIFRKILTDDKKDEASRPLLSKEERAILWAPINTKPLREIAKQRKKRLDAGCREAVVVRFLTTVGNWRKNPSRCGPPRFQRADEMNAISIPLVYNDGKSAEWLIGGEGTSSVRETRNLKTEAPEEYLNNGHFCVGVTRERLNLHIAYGGRSGRKKYYLPEGCRIKQVTLCGRRDSAFNWSWSFQVRLEHPPEPARQPTGRVCGWDSCGWRLMDGYIRLGVIADNAGHFYELMVPLAIGAACRRMRREKEYCLKQGWEYGKPLSFDDAEALDARYGTTLEACKTQVRKIYEGEKENWPAGARKIMSGIMKMRDTGLRRLRRKLEPIESEAKRTIDDWDAEAAKMNETIRAFEIHANNAKRDAYRQIAAWLNAFDIIAWEGDLSLKQMAEKAGKKKQKRKEAHEETGQWNERTPEERQFEASQKYRQIAGQRQLREFVKQKHESRLQNEKAAYSTRTCPECGGTIEPGRKLLLVCENGHVRDQDVSAALHFLNKIEGVASITAPPVEIPAHLGPYLRVMDASEVRLELAEKR

SEQ ID NO: 103 - protein, 600 aa, Unknown
  Description of Unknown: terrestrial-soil-tropical forest soil sequence
MEDISKKPERRKNPARRERLNKDWPIKVHNYRCSPNEKPPQALWDTAHEMRRLWNDLTAVFRKILAEDKKDEDGKPLLSKEERANLWAPINVKPLREIAKQRKDKLDIGCREYVVTHFITTVNNWRRNPRRFGPPRFQNAADMDSVHIPLVYTDGKSADWLTGGNGTAWVRDTLHIKKNALRDKDGCPVLSENELEEYLNNGHFCVGITREKLSLHIAYGGRSGRKKYHLPDKCRIKQVALCGRRNSAFGWSWSFQVRLEHPPDPERQVTGRVCGWDSGGWRKMDSYIRLGVIADNAGHFYELMVPLAIGAASHRLRHEREHCQKNGWEYNKPITFDDAEALQSRYGLALEACKTNLRIIFEEEKEKWPDDARKIMGGIIRMRDDGLRRLRRKLDEIESAAKQTIDDWDAEAAKLNETIRAFQRHAGNAKRNAYRQITAWLSAFDRIAWEGDLNLKWMAEQPGKKKQERKKTLAETGQWGERTAEDRQLEASQRYRQIVGQYRLRELVKQTHEARLQNEKTAHSTRTCSECGARINPGGKLMLVCEKGHKRDQDVTASLYLLSKIEGYASISGPPIEIPAHLSPYLRVMTASDVALEIVE

SEQ ID NO: 104 - protein, 522 aa, Unknown
  Description of Unknown: Anaerolineae bacterium sequence
MRPKKNADTIYQTYKFWIKPSDPLPQLLWDKAKAMNAAWTSLVLMRQETLETWMAQRDTLTADQKRAFWNTFNLAVREKIEECELDWETSGVLHDRFLVAHQRALKDKADLHGRTRLQRILLVHRYTGGGIPIEKLLSTRAWRFALDAFPTEDVYATNTRQARRGRQTQGRFGLDNETAVEFSIILHRPLPPAAIVKRVALSGRRQKPPAHEWDWALVVSVEVPNPSRTAAGRVIGIDLGWRKIDDYLRIGYAADDTDQQIELRLPLDFSTQKARSAGYPCNHAELRALEGWIAVAVDATKAAIGELITVPSLVLMRQGGLVRLQRTLSEKPDLSEAEVEALRILGAWRKQNDRLQKIYNFSTARFAARRRWLYQNLAAWLCRNYDVIAIEGDLDVKGLAEEPDPDPALKAAQRYRQIAAPGELREIIRWTAQREGVIVKDCNTAYSTTTCFTCGEQAEAGPDLILECPAGHRFDQDANAAANLLSQILPLTEVQDGLRKNQRDFLRIPPELQMVAVVVHRD

SEQ ID NO: 105 - protein, 520 aa, Unknown
  Description of Unknown: aquatic-freshwater-bog sequence
MQRERKRKESHDIRPHKYRAWFAEGDGTRLPEPVYLLAKRMQDCWTDIALHDQQAYDEWRTAHPVPTPPAGLEGEALAKWRKENWPKPPKPFYVGNQEWAEGRVGQANLPDELGQTILDRLAVTFKNMKKGGGPPKPHGRLDKFTFHHRYTGGGLPVNKLGRQLGERFRISIPPPQAYQPKEDIMNPRASRCQRVCLAWFRVDGVPVRLNVMMHRSLPEGDVYVKRVALVGRKSSAALPWEVYLVFTLEVPSETEAQAPLGTRCGIDVGWRKLDDGRMRVAVLHDGKPTPEELIMPLRIYDRKLGEVSLERLANLKRCRDGLLERTKATVAAMFGTPLSDWTRIRNGGLIRLMREDGAPAEVIAMLETWKRDSDRYLRMERMLENRMRRHYEWRYGKWAKDVATRHRTVRIKKMDQKEMWAVEKTKDYPALKASAERRKLAAGGSLLAMVRHAVRKACGNLVEVEAAHTTDTCAACGSHFEAGAGLMGRCEQGHVMDQDWNAAGNIYAGRAGATAQAAVG

SEQ ID NO: 106 - protein, 520 aa, Unknown; identical to SEQ ID NO: 105
  Description of Unknown: aquatic-freshwater-bog sequence

SEQ ID NO: 107 - protein, 520 aa, Unknown; identical to SEQ ID NO: 105
  Description of Unknown: aquatic-freshwater-bog sequence

SEQ ID NO: 108 - protein, 520 aa, Unknown
  Description of Unknown: aquatic-freshwater-peatland sequence
MQRERKRKETHDIRPHKYRAWFAEGDGSRLPEPVFALARRMQDCWTDIALHNQDAYDEWRMAHPAPAAPAGLEGQTIEKWRRENWPKLPKPYYEGNQAWAESRVRQANLPGELGQTILDRLSVTFKNMKKGGGPPKPHYRLDRFAFHHRYTSGGLPVLGLRSQRSQRFHILLPSPHAYQTKGGTKNPRELRRQRVCPAWFCVDGVSARLNVMMHRPLPEGDAYVKRVALVGKKSSAAMPWEVSLALTVEVPVAKEPQAPAGTRCGLDVGWRKLDKDRMRVAVLYNGGPNSEELVMPLRIHDRKLGEVSLERLARLNRCRDALLERTKAAVATMLGTEPSAWAQMRNGGLVRLMREDGAPPEVIEVLEAWKQDNDRYLRLERLVEAHLRRHYEWRYGKWAKDVATRYRTVRIRKMGQKEMWAVEKTKDYPALKASAERRKLAAGGSLLSMVRHAVRKACGNLVEVEAAHTTDTCAACGSHFEAGAGLMGRCEQGHVMDQDWNAAGNIYAGRAGATAQAAVG

SEQ ID NO: 109 - protein, 534 aa, Unknown
  Description of Unknown: aquatic-freshwater-peatland sequence
MSARTIEERKGKTSMQRERKRKETHDIRPHKYRAWFAEGDGTRLPEPIFALAKRMQDCWTDIALHNQDAFEEWRMAHPLPAPPDGLAGEAFEDWRRKNWPRPPKPFYEANQAWAESRVRQANLPGELGETILDRLSVTVNNMKKGGGPPKPHYRLDRFAFHHRYTSGGLPVLGLRSQRSQRFHILLPPPNAYQPKGGMRNPHELRRQRVCPAWFCVDGVPVRLNVMMHRPLPEGDAYLKRVALVGKKSSAALPWEVFLVLTVEVPLAKEPQAPAGTRCGLDVGWRKLDKDRMRVAVLYNGGPNSEELVMPLRIHDRKLGEVSLERLARLNRCRDALLERTKAAVATMLGTEPSAWAQMRNGGLVRLMREDGAPPEVIEVLEAWKQDNDRYLRLERLVEAHLRRHYEWRYGKWAKDVATRYRTVRIRKMGQKEMWAVEKTKDYPALKASAERRKLAAGGSLLSMVRHAVRKACGNLVEVEAAHTTDTCAACGSHFEAGAGLMGRCEQGHVMDQDWNAAGNIYAGRAGATAQAAVG

SEQ ID NO: 110 - protein, 520 aa, Unknown
  Description of Unknown: aquatic-freshwater-peatland sequence
MQRERKRKETHDIRPHKYRAWFAEGDGTRLPEPIFALAKRMQDCWTDIALHNQDAFEEWRMAHPLPAPPDGLAGEAFEDWRRKNWPRPPKPFYEANQAWAESRVRQANLPGELGETILDRLSVTVNNMKKGGGPPKPHYRLDRFAFHHRYTSGGLPVLGLRSQRSQRFHILLPPPNAYQPKGGMRNPHELRRQRVCPAWFCVDGVPVRLNVMMHRPLPEGDAYLKRVALVGKKSSAALPWEVFLVLTVEVPLAKEPQAPAGTRCGLDVGWRKLDKDRMRVAVLYNGGPNSEELVMPLRIHDRKLGEVSLERLARLNRCRDALLERTKAAVATMLGTEPSAWAQMRNGGLVRLMREDGAPPEVIEVLEAWKQDNDRYLRLERLVEAHLRRHYEWRYGKWAKDVATRYRTVRIRKMGQKEMWAVEKTKDYPALKASAERRKLAAGGSLLSMVRHAVRKACGNLVEVEAAHTTDTCAACGSHFEAGAGLMGRCEQGHVMDQDWNAAGNIYAGRAGATAQAAVG

SEQ ID NO: 111 - protein, 520 aa, Unknown; identical to SEQ ID NO: 105
  Description of Unknown: aquatic-freshwater-peatland sequence

SEQ ID NO: 112 - protein, 520 aa, Unknown; identical to SEQ ID NO: 105
  Description of Unknown: aquatic-freshwater-peatland sequence

SEQ ID NO: 113 - protein, 520 aa, Unknown; identical to SEQ ID NO: 108
  Description of Unknown: aquatic-freshwater-peatland sequence

SEQ ID NO: 114 - protein, 534 aa, Unknown
  Description of Unknown: aquatic-freshwater-peatland sequence
MSARTIEERKGKTSMQRERKRKETHDIRPHKYRAWFAEGDGTRLPEPIFALAKRMQDCWTDIALHNQDAFEEWRMAHPLPAPPDGLAGEAFEDWRRKNWPRPPKPFYEANQAWAESRVRQANLPGELGETILDRLSVTVNNMKKGGGPPKPHYRLDRFAFHHRYTSGGLPVLGLRSQRSQRFHILLPPPNAYQPKGGMRNPHELRRQRACPAWFCVDGVPVRLNVMMHRPLPEGDAYLKRVALVGKKSSAALPWEVFLVLTVEVPLAKEPQAPAGTRCGLDVGWRKLDKDRMRVAVLYNGGPNSEELVMPLRIHDRKLGEVSLERLARLNRCRDALLERTKAAVATMLGTEPSAWAQMRNGGLVRLMREDGAPPEVIEVLEAWKQDNDRYLRLERLVEAHLRRHYEWRYGKWAKDVATRYRTVRIRKMGQKEMWAVEKTKDYPALKASAERRKLAAGGSLLSMVRHAVRKACGNLVEVEAAHTTDTCAACGSHFEAGAGLMGRCEQGHVMDQDWNAAGNIYAGRAGATAQAAVG

SEQ ID NO: 115 - protein, 520 aa, Unknown
  Description of Unknown: aquatic-freshwater-peatland sequence
MQRERKRKETHDIRPHKYRAWFAEGDGTRLPEPIFALAKRMQDCWTDIALHNQDAFEEWRMAHPLPAPPDGLAGEAFEDWRRKNWPRPPKPFYEANQAWAESRVRQANLPGELGETILDRLSVTVNNMKKGGGPPKPHYRLDRFAFHHRYTSGGLPVLGLRSQRSQRFHILLPPPNAYQPKGGMRNPHELRRQRACPAWFCVDGVPVRLNVMMHRPLPEGDAYLKRVALVGKKSSAALPWEVFLVLTVEVPLAKEPQAPAGTRCGLDVGWRKLDKDRMRVAVLYNGGPNSEELVMPLRIHDRKLGEVSLERLARLNRCRDALLERTKAAVATMLGTEPSAWAQMRNGGLVRLMREDGAPPEVIEVLEAWKQDNDRYLRLERLVEAHLRRHYEWRYGKWAKDVATRYRTVRIRKMGQKEMWAVEKTKDYPALKASAERRKLAAGGSLLSMVRHAVRKACGNLVEVEAAHTTDTCAACGSHFEAGAGLMGRCEQGHVMDQDWNAAGNIYAGRAGATAQAAVG

SEQ ID NO: 116 - protein, 526 aa, Unknown
  Description of Unknown: biofilm metagenome sequence
MKRKERKRPYYPVTVFSFHLEPHSIPQQVWDTAKEMQALWNLMTEAHKRILEQTAEMEKPQKVEPYRAFYKEVYNLTKAAPLNAGCKWDVHDRFIATLKRFHKKQGGPPKFKKGLDRVRIVRRFFDGGRPIEWLFSRTSDRQPVRLRQVAENRQGRLMRGFFNVGDEQMDFEAVQHRAIPQGSFLKQIALTGRLIRAFNDAEHRGWQWSLNLTVEIPPQAMAASVGRVAALDVGWRVRGDYLRIGLLTDTDGNLYELRLPFDLSNRSARRCEGGGYQMVSSFKQMWEIESEQDEYLESVKERVRPRFDEMPEELRPDKGSWHKVREGGLRRLLWSLVEANACPDVREILTRWRERNGAFEKQIAGGRERMLKRREWMYRNIAAWIADRYDELVWEGDFNLSTVAADDTDDPALKAAQRYRQMAALYTLRQAIGQAMRKRGRVIVESPAAYSTQTCSICKAHVPSGADLILRCESGHLMDQDVNAARIMLGERVGELRAMAGVSTSVDRSQVSGVVVPLNVDAKVRG

SEQ ID NO: 117 - protein, 586 aa, Unknown
  Description of Unknown: plants-rhizosphere-populus rhizosphere sequence
MIDEKTAKRKSPIRRGRLNKDWPIKVYTYDCWPQEKPPQALWDTAHEMRRLWNDFTAIFRKILADDKKDEAGKPLLSKEERAILWAPINTKPLREIAKQRKEKLDAGCREAVVVRFLTTVGNWRKNPSRVGPPRFKRADDMNAISIPLVYNDGKSAEWLNGGEGTSSIRDTRNLKTEAPEEYLNNGHFCVGITRERLNLHVAYGGRSGRNKYYLPAECRIKQVALCGRRDSAFSWSWSFQVRLEHPPDPARRPTGRVCGWDSGGWRLMDGYIRLGVIADNAGHFYELMVPLVIGAASRRMRREKEYCHKHGWEYSKPMTFDDAEALDASYGATLEACKTEVCKIFEEEKEDWPADAGKIMSRIVKMRDMGLRRLRRKLEQIESEAKRTIDEWDAEAAKMNETIRAFEIHAYKAKRDAYRQIAAWLNAFDIIAWEGDLSLKQMAEQVGKKKQKRKEAHKETGQWNERTPEELQFEASQKYRQIAGQHGLREFVKQKHKSRLQNEKAAYSTQTCPECGGAIEPGHKLLLVCENGHGRDQDVTAALHFLNKIEGVASIMVPPVEIPAHLRPYLRVMDASEARLELAEKL

SEQ ID NO: 118 - protein, 586 aa, Unknown; identical to SEQ ID NO: 117
  Description of Unknown: plants-rhizosphere-populus rhizosphere sequence

SEQ ID NO: 119 - protein, 586 aa, Unknown; identical to SEQ ID NO: 117
  Description of Unknown: plants-rhizosphere-populus rhizosphere sequence

SEQ ID NO: 120 - protein, 506 aa, Unknown
  Description of Unknown: soil metagenome sequence
MAYKFRAYVTGTDASHGQMLPPAIYTVAKNMENCWSDIANHNEQEYGAWKAAHVGADGKLPINIKSKTPIKPPKEFYAASEAWAIERIEQAQLPDELGTTILDRLHTTYKMMKRGGGPPKPKRRMDRFALHHRYTGGGMPVANLGGQRAERFRVLLPSGTAYQPWGRVKNPRDRRRERTVKAWFRVGDQPIQLRVVMHRPLSVEDCFVKRVYLTGEKPSVAMPWVYYLVILIELPKPIVKNTNAATVGIDVGWRKLDDERLRVAVGYDGHSHPELVLPLTFQARGLGEVSLDRISKVKTLRDNSLEATKDKLRTLLNPLPPGFAQMRNGGLLRLLRLMQQNEPDSPVIGMLENWKTDNDRYLRLERVLENKLMAHRDKMYEKWALVEIATKYGVVKIEKMNQQEMWDAEANKKDPALRAAAERRKYASCGALLAYIRRTVKRVGGEIVEVPAEHTTDICSECGALFEAGSEIIGRCTRGHEKDQDWNAAENIYAYSSAPVAELLSA

SEQ ID NO: 121 - protein, 615 aa, Unknown
  Description of Unknown: soil metagenome sequence
MMQDTLQLKQRKNLARRERLNKDWPIKVYTYACWPQGTIPSALWDTAHEMRRLWNDFTAIFRDILGKDLKDELGKPLLSKQERAILWAPINTKPLREIAKQRKDRLDAGAGEGVVVRFMTTVGNWRKNPARYGPPRFQRADEMDTILIPLVYNDGKSAEWLLSGNGTSAVRDTRQLKTAAPQEYLNNGHFCIGITREKLNLHIAYGGRSGQKKHHLPAKCRIKQVALAGKRDSVFGWSWSFQVRLEYPPEPARQSTGRVCGWDSAGWRKMDDYIRLGVIADNAGHFYELRVPLAIGAASKRVRRERKHCQKNGWEYSKPITFDDAQALHSRYGTALEACKANVHKIFEEEKETWPEDARKIMGGIVRMRDSGLRRLRQKLAPIDSVAKQTIDDWDVEAASLNGTIRAFEKHVDNVKKGAYRQIAAWLNTFDRVVWEGDLNLKQLAEAAGGKKEKRKKQYAETGKYGERTSEDRQLEASQRYRQIAGLYMLGQFVFEKIAICECSHSTQQHFRQIGPCHCGCESYQEARLIDGSTAYSTQTCPECGASIEAGGKLLLVCENGHKRDQDCATSLYFLNKIEGRASISAPPLKIPAHLKPYLRVMDASEVRLELVDKQ

SEQ ID NO: 122 - protein, 673 aa, Unknown
  Description of Unknown: soil metagenome sequence
MNTKSNMRVKGETQETPLASIPPRSTAATSGSAPAPPGPGSSIVKDNRKKTPRRERLHKDWPIKVLVYPCWPIGEPPVELWDTAHEMRRLWNAFASLFRDALEADVKDEAGKPSLSKEDRAKVWAPINMNNLREVGKERKEKLDQACRESVVNRFLKTVNNWRKNSRENGPPRFRRAAEMDTVSIPLEYNYGKSAEWLNKGEGTAGVRYTLDIKKNAPRDGNGAPLLSEEDLLAYLNNGHFSVGVSRARLDLHIAYGGRSGKKKYFLPPGCRIKAVSLCGKRDSAHGWSWSFQVRLEHPPGSSRPLTGRVCGWDAVGWRLMDGYIRIGVIADNAGHFYEVRVPLAIGELSRRVRREKAHCEKQGWEYTKPTTWDDLRELDSRYSKALDACKNEVRKTYEEEKDKWPPEARRRMGGFAKMRDSGLRRLRRKLEESDSAAKETIDNWDAEAAQLNKMIRAFEIHAAMAKRDAFRQIAAWLDAFDRVAWSAEPGLKSMAEAAGKRKQRRKEKYLETGQWEERTPEERVFENSQKFRQIVGLHNLRQFVKERHGVGCFCGDHLLQHEDNQGGCLACDCQAFNPRLMNCDAPYSTQACPECGGAIKRGHKLLLRCENGHERDQDVSQSLHLLGSIEGYTSIAAPPLDIPPHLRPYLRLMDASEAQITECARHSFRRRP

SEQ ID NO: 123 - protein, 602 aa, Unknown
  Description of Unknown: soil metagenome sequence
MEDISKKPERRKNFARRERLNKDWPFKVYPYRCMLREKPPQALWDTAREMRRLWNDFTETFHKILKEDKKDEDGKPLLSKEQRATLWASINIKPLREIAKKRKDKLDIGCREFIVTNFITTVGNWRKNPGKFGPPRFQPASEIRSIYIPLVYYDGKSAEWLHCGKGTAWVQDTLHIKKNASRDEKGRPILTEEEMEQYLNNSHFCVGITREKLNLHVAYGGRSGKKKRYLPDKCRIKWVALAGRRDSAFGWSWSFQVRLEHPPDPERQVTGRVCGWDSGGWRKMDGYIRLGVIADNAGHFYELMVPLAIGAASHRLRHEREHCQKNGWEYNKPITFDDAEALQSRYGLALEACKTNLRKIFEEEKEKWPDDARKIMGGIVRMRDDGLRRLRRKLDAIESAAKQTIDDWNAEAAKLNETIRAFQRHADNAKKDAYRQITAWLSAFDRIAWEGVLNLKWMAEQPGKKKQERKKTLAETGQGGERTAEDRQLEASQRYRHIVGQYRLREFVKQTHEARLQNEKTAYSTRTCPECGAHINPGGDLQLVCDNGHKRDQDVTTSLYLLSKIEGYASASGPPIEIPAHLSQYLRVMHASEVRLEIVEKH

SEQ ID NO: 124 - protein, 600 aa, Unknown
  Description of Unknown: soil metagenome sequence
MEDISKKPERRKNPARRERLNKDWPIKVHNYRCSLNEKPPQTLWDTAHEMRRLWNDLTAVFRKILAEDKKDEDGKPLLSKEERANLWAPINIKPLREIAKQRKDKLDIGCREYVVTHFITTVNNWRRNPRRFGPPRFQNAADMDSVHIPLVYTDGKSADWLTGGNGTAWVRDTLHIKKNALRDKDGRPILSENELEEYLNNGHFCVGITREKLSLHIAYGGRSGRKRYHLPDKCRIKQVALCGRRNSAFGWSWSFQVRLEHPPDPERQVTGRVCGWDSVGWRKMDGYIRLGVIADNAGHFYELMVPLAIGAASHRLRHEREHCQKNGWEYNKPITFDDAEALQSRYGLALEACKTNLRKIFEEEKEKWPDDARKIMGGIVRMRDDGLRRLRRNIDAIESAAKQTIDDWDAEAAKLNETIRAFQRHADNAKKDAYRQITAWLSAFDKIAWEGDRSLKGMSEQGGKEKQKRKKMHEETGQWGERTAEERQLEASQRNRQIVGQHRLREFVKRMHADRLQNEKTAHSTRICPECGAHINPGGDLQLVCDNGHKRDQDVTTSLYLLSKIEGCASASGPPIEIPAHLSPYLRVMTASEVALEIVE

SEQ ID NO: 125 - protein, 522 aa, Unknown
  Description of Unknown: terrestrial-soil-fen sequence
MRPKKNADTIYQTYKFWIKPSDPLPQLLWDKAKAMNAAWTSLVLMRQETLETWMAQRDTLTADQKRAFWNTFNLAVREKIEECELDWETSGVLHDRFLVAHQRALKDKADLHGRTRLQRILLVHRYTGGGIPIEKLLSTRAWRFALDAFPTEDVYATNTRQARRGRQTQGRFGLDNETAVEFSIILHRPLPPAAIVKRVALSGRRQKPPAHEWDWALVVSVEVPNPSRTAAGRVIGIDLGWRKIDDYLRIGYAADDTDQQIELRLPLDFSTQKARSAGYPCNHAELRALEGRIAVAVDATKAAIGELIAVPSLALMRQGGLVRLQRTLSEKPDLSEAEVEALRILGAWRKQNDRLQKIYNFSTARFAARRRWLYQNLAAWLCRNYDVIAIEGDLDVKGLAEEPDPDPALKAAQRYRQIAAPGELREIIRWTAQREGVIVKDCNTAYSTTTCFTCGEQAEAGPDLILECPAGHRFDQDANAAANLLSQILPSTEVQDGLRKNQRDFLRIPPELQMVAVVVHRD

SEQ ID NO: 126 - protein, 547 aa, Unknown
  Description of Unknown: terrestrial-soil-surface soil sequence
MSAIIEVQKPQHRKERANPDWPVKVYSYWIEPIGDIPEWFWLFHDHMQLLWNDMVIAHDAFIDEREFSEESDGKWDTDRKRLEFSGLREKLKNVAKSKKGILPSSCYYEVRDRFLITMGRYWNPDSTLKRRRNETKNFDLGRPGMKFGRNKVLIPHDLNAANISTSILFSNKKPLTILQRTKQQGPTRGIFETLGYNFNFRINLHRPIPNGNIKRIAIVGEMVKPFGWQWRLNLTIEEPPVRPQRKNGRVAAIDLGWRLMDDCIRIGVLVDNSDNAIELSIPLDFANNSLRRQREHFMDVTDACLPIHSIPDIWKAQQESDLILEVCKNRLTALIPELLPNKVAWDKARHKSLIKLLNTLREDHPESSAIAVIEQWRTTNWVLHRRWRAAYERFMRWRREIYRVLAAEIASTYDEIVLEDRLNLAEMSRDEQAPPAIKASQKYRHWTSLYLFKECLKYAMDKQQKLIIAGKTAYSTATCSTCDGKINTDASLYLTCANGHTLDQDLNAARNLLKSYPECESLPGLESPIRHSQLSKCVRTLSLLKSL

SEQ ID NO: 127 - protein, 615 aa, Unknown
  Description of Unknown: terrestrial-soil-tropical forest soil sequence
MMQDTLLLKQRKNLARRERLNKDWPIKVYTYACWPQGTIPSALWDTAHEMRRLWNDFTAIFRDILSKDLKDELGKPLLSKQERAILWAPINTKPLREIAKQRKDELDAGTREGVVVRFMTTVGNWRKNPARYGPPRFQRADEMDTILIPLVYNDGKSAEWLLSGNGTSAVRDTRQLKTAAPQEYLNNGHFCIGITREKLNLHIAYGGRSGQKKHHLPAKCRIKQVALAGKRDSVFGWSWSFQVRLEYPPEPARQSTGRVCGWDSAGWRKMDDYIRLGVIADNAGHFYELRVPLAIGAASKRVRRERKHCQKNGWEYSKPITFDDAQALHSRYGTALEACKANVHKIFEEEKETWPEDARKIMGGIVRMRDSGLRRLRQKLAPIDSVAKQTIDDWDVEAASLNETIRAFEKHVDNVKKGAYRQIAAWLNTFDRVVWEGDLNLKQLAEAAGGKKEKRKKQYAETGKYGERTPEDRQLEASQRYRQIAGLYMLRQFVFEKIAICECSHSTQQHFRQIGPCHCGCESYQEARLIDGSTAYSTQTCPECGASIEAGGKLLLVCENGHKRDQDCATSLYFLNKMEGRASISAPPLKIPAHLKPYLRVMDASEVRLELVDKQ

SEQ ID NO: 128 - protein, 615 aa, Unknown
  Description of Unknown: terrestrial-soil-tropical forest soil sequence
MMQDTLLLKQRKNLARRERLNKDWPIKVYTYACWPQGTIPSALWDTAHEMRRLWNDFTAIFRDILSKDLKDELGKPLLSKQERAILWAPINTKPLREIAKQRKDELDAGTREGVVVRFMTTVGNWRKNPARYGPPRFQRADEMDTILIPLVYNDGKSAEWLLSGNGTSAVRDTRQLKTAAPQEYLNNGHFCIGITREKLNLHIAYGGRSGQKKHHLPAKCRIKQVALAGKRDSVFGWSWSFQVRLEYPPEPARQSTGRVCGWDSAGWRKMDDYIRLGVIADNAGHFYELRVPLAIGAASKRVRRERKHCQKNGWEYSKPITFDDAQALHSRYGTALEACKANVHKIFEEEKETWPEDARKIMGGIVRMRDSGLRRLRQKLAPIDSVAKQTIDDWDVEAASLNETIRAFEKHVDNVKKGAYRQIAAWLNTFDRVVWEGDLNLKQLAEAAGGKKEKRKKQYAETGKYGERTPEDRQLEASQRYRQIAGLYMLRQFVFEKIAICECSHSTQQHFRQIGPCHCGCESYQEARLIDGSTAYSTQTCPECGASIEAGGKLLLVCENGHKRDQDCATSLYFLNKIEGRASISAPPHKIPAHLKPYLRVMDASEVRLELVDKQ

SEQ ID NO: 129 - protein, 615 aa, Unknown
  Description of Unknown: terrestrial-soil-tropical forest soil sequence
MMQDTLLLKQRKNLARRERLNKDWPIKVYTYACWPQGTIPSALWDTAHEMRRLWNDFTAIFRDILSKDLKDELGKPLLSKRERAILWAPINTKPLREIAKQRKDELDAGAREGVVVRFMTTVGNWRKNPARYGPPRFQRADEMDTILIPLVYNDGKSAEWLLSGNGTSAVHDTRQLKTAAPQEYLNNGHFCIGITREKLNLHIAYGGRSGQKKHHLPAKCRIKQVALAGKRDSVFGWSWSFQVRLEYPPEPARQSTGRVCGWDSAGWRKMDDYIRLGVIADNAGHFYELRVPLAIGAASKRVRRERKHCQKNGWEYSKPITFDDAQALHSRYGTALEACKANVHKIFEEEKETWPEDARKIMGGIVRMRDSGLRRLRQKLAPIDSVAKQTIDDWDVEAASLNETIRAFEKHVDNVKKGAYRQIAAWLNTFDRVVWEGDLNLKQLAEAAGRKKEKRKKQYAETGKYGERTPEDRQLEASQRYRQIAGLYMLRQFVFEKIAICECSHSTQQHFRQIGPCHCGCESYQEARLIDGSTAYSTQTCPECGASIEAGGKLLLVCENGHKRDQDCATSLYFLNKIEGRASISAPPLKIPAHLKPYLRVMDASEVRLELVDKQ

SEQ ID NO: 130 - protein, 673 aa, Unknown; identical to SEQ ID NO: 122
  Description of Unknown: terrestrial-soil-vadose zone soil sequence

SEQ ID NO: 131 - protein, 615 aa, Unknown; identical to SEQ ID NO: 121
  Description of Unknown: terrestrial-soil-vadose zone soil sequence

SEQ ID NO: 132 - protein, 615 aa, Unknown; identical to SEQ ID NO: 121
  Description of Unknown: terrestrial-soil-vadose zone soil sequence

SEQ ID NO: 133 - protein, 614 aa, Unknown
  Description of Unknown: terrestrial-soil-vadose zone soil sequence
MQDTLQLKQRKNLARRERLNKDWPIKVYTYACWPQGTIPSALWDTAHEMRRLWNDFTAIFRDILGKDLKDELGKPLLSKQERAILWAPINTKPLREIAKQRKDRLDAGAGEGVVVRFMTTVGNWRKNPARYGPPRFQRADEMDTILIPLVYNDGKSAEWLLSGNGTSAVRDTRQLKTAAPQEYLNNGHFCIGITREKLNLHIAYGGRSGQKKHHLPAKCRIKQVALAGKRDSVFGWSWSFQVRLEYPPEPARQSTGRVCGWDSAGWRKMDDYIRLGVIADNAGHFYELRVPLAIGAASKRVRRERKHCQKNGWEYSKPITFDDAQALHSRYGTALEACKANVHKIFEEEKETWPEDARKIMGGIVRMRDSGLRRLRQKLAPIDSVAKQTIDDWDVEAASLNGTIRAFEKHVDNVKKGAYRQIAAWLNTFDRVVWEGDLNLKQLAEAAGGKKEKRKKQYAETGKYGERTSEDRQLEASQRYRQIAGLYMLGQFVFEKIAICECSHSTQQHFRQIGPCHCGCESYQEARLIDGSTAYSTQTCPECGASIEAGGKLLLVCENGHKRDQDCATSLYFLNKIEGRASISAPPLKIPAHLKPYLRVMDASEVRLELVDKQ

SEQ ID NO: 134 - protein, 673 aa, Unknown; identical to SEQ ID NO: 122
  Description of Unknown: terrestrial-soil-vadose zone soil sequence

SEQ ID NO: 135 - protein, 615 aa, Unknown; identical to SEQ ID NO: 121
  Description of Unknown: terrestrial-soil-vadose zone soil sequence

SEQ ID NO: 136 - protein, 673 aa, Unknown
  Description of Unknown: terrestrial-soil-vadose zone soil sequence
MNTKSNMRVKGETQETPLASIPPRSTAATSGSAPAPPGPGSSIVKDNRKKTPRRERLHKDWPIKVLVYPCWPIGEPPVELWDTAHEMRRLWNAFASLFRDALEADVKDEAGKPSLSKEDRAKVWAPINMNNLREVGKGWKEKLDQACRESVVNRFLKTVNNWRKNSRENGPPRFRRAAEMDTVSIPLEYNYGKSAEWLNKGEGTAGVRYTLDIKKNAPRDGNGAPLLSEEDLLAYLNNGHFSVGVSRARLDLHIAYGGRSGKKKYFLPPGCRIKAVSLCGKRDSAHGWSWSFQVRLEHPPGSSRPLTGRVCGWDAVGWRLMDGYIRIGVIADNAGHFYEVRVPLAIGELSRRVRREKAHCEKQGWEYTKPTTWDDLRELDSRYSKALDACKNEVRKTYEEEKDKWPPEARRRMGGFAKMRDSGLRRLRRKLEESDSAAKETIDNWDAEAAQLNKMIRAFEIHAAMAKRAAFRQIAAWLDAFDRVAWSAEPGLKSMAEAAGKRKQRRKEKYLETGQWEERTPEERVFENSQKFRQIVGLHNLRQFVKERHGVGCFCGDHLLQHEDNQGGCLACDCQAFNPRLMNCDAPYSTQACPECGGAIKRGHKLLLRCENGHERDQDVSQSLHLLGSIEGYTSIAAPPLDIPPHLRPYLRLMDASEAQITECARHSFRRRP

SEQ ID NO: 137 - protein, 615 aa, Unknown; identical to SEQ ID NO: 121
  Description of Unknown: terrestrial-soil-vadose zone soil sequence

SEQ ID NO: 138 - protein, 602 aa, Unknown
  Description of Unknown: terrestrial-soil-vadose zone soil sequence
MEDISKKPERRKNFARRERLNKDWPFKVYPYRCMLREKPPQALWDTAREMRRLWNDFTETFHKILKEDKKDEEGRPLLSKEQRATLWASINIKPLREIAKKRKDKLDIGCREFIVTNFITTVGNWRKNPGKFGPPRFQPASEIRSIYIPLVYYDGKSAEWLHCGKGTAWVQDTLHIKKNASRDEKGRPILTEEEMEQYLNNSHFCVGITREKLNLHVAYGGRSGKKKRYLPDKCRIKWVALAGRRDSAFGWSWSFQVRLEHPPDPERQVTGRVCGWDSGGWRKMDGYIRLGVIADNAGHFYELMVPLAIGAASHRLRHEREHCQKNGWEYNKPITFDDAEALQSRYGLALEACKTNLRKIFEEEKEKWPDDARKIMGGIVRMRDDGLRRLRRKLDAIESAAKQTIDDWNAEAAKLNETIRAFQRHADNAKKDAYRQITAWLSAFDRIAWEGDLNLKWMAEQPGKKKQERKKTLAETGQGGERTAEDRQLEASQRYRHIVGQYRLREFVKQTHEARLQNEKTAHSTRTCPECGAHINPGGDLQLVCDNGHKRDQDVTTSLYLLSKIEGCARVSAPPIEIPAHLSQYLRVMHASEVRLEIVEKH

SEQ ID NO: 139 - protein, 673 aa, Unknown; identical to SEQ ID NO: 122
  Description of Unknown: terrestrial-soil-vadose zone soil sequence

SEQ ID NO: 140 - protein, 615 aa, Unknown; identical to SEQ ID NO: 121
  Description of Unknown: terrestrial-soil-vadose zone soil sequence

SEQ ID NO: 141 - protein, 673 aa, Unknown
  Description of Unknown: terrestrial-soil-vadose zone soil sequence
MNTKSNMRVKGETQETPLASIPPRSTAATSGSAPAPPGPGSSIVKDNRKKTPRRERLHKDWPIKVLVYPCWPIGEPPVELWDTAHEMRRLWNAFVSLFRDALEADVKDEAGKPSLSKEDRAKVWAPINMNNLREVGKERKEKLDQACRESVVNRFLKTVNNWRKNSRENGPPRFRRAAEMDTVSIPLEYNYGKSAEWLNKGEGTAGVRYTLDIKKNAPRDGNGAPLLSEEDLLAYLNNGHFSVGVSRARLDLHIAYGGRSGKKKYFLPPGCRIKAVSLCGKRDSAHGWSWSFQVRLEHPPGSSRPLTGRVCGWDAVGWRLMDGYIRIGVIADNAGHFYEVRVPLAIGELSRRVRREKAHCEKQGWEYTKPTTWDDLRELDSRYSKALDACKNEVRKTYEEEKDKWPPEARRRMGGFAKMRDSGLRRLRRKLEESDSAAKETIDNWDAEAAQLNKMIRAFEIHAAMAKRDAFRQIAAWLDAFDRVAWSAEPGLKSMAEAAGKRKQRRKEKYLETGQWEERTPEERVFENSQKFRQIVGLHNLRQFVKERHGVGCFCGDHLLQHEDNQGGCLACDCQAFNPRLMNCDAPYSTQACPECGGAIKRGHKLLLRCENGHERDQDVSQSLHLLGSIEGYTSIAAPPLDIPPHLRPYLRLMDASEAQITECARHSFRRRP

SEQ ID NO: 142 - protein, 673 aa, Unknown
  Description of Unknown: terrestrial-soil-vadose zone soil sequence
MNTKSNMRVKGETQETPLASIPPRSTAATSGSAPAPPGPGSSIVKDNRKKTPRRERLHKDWPIKVLVYPCWPIGEPPVELWDTAHEMRRLWNAFASLFRDALEADVKDEAGKPSLSKEDRAKVWAPINMNNLREVGKERKEKLDQACRESVVNRFLKTVNNWRKNSRENGPPRFRRAAEMDTVSIPLEYNYGKSAEWLNKGEGTAGVRYTLDIKKNAPRDGNGAPLLSEEDLLAYLNNGHFSVGVSRARLDLHIAYGGRSGKKKYFLPPGCRIKAVSLCGKRDSAHGWSWSFQVRLEHPPGSSRPLTGRVCGWDAVGWRLMDGYIRIGVIADNAGHFYEVRVPLAIGELSRRVRREKAHCEKQGWEYTKPTTWDDLRELDSRYSKALDACKNEVRKTYEEEKDKWPPEARRRMGGFAKMRDSGLRRLRRKLEESDSAAKETIDNWDAEAAQLNKMIRAFEIHAAMAKRDAFRQIAAWLDAFDRVAWSAEPGLKSMAEAAGKRKQRRKEKYLETGQWEERTPEERVFENSQKFRQIVGLYNLRQFVKERHGVGCFCGDHLLQHEDNQGGCLACDCQAFNPRLMNCDAPYSTQACPECGGAIKRGHKLLLRCENGHERDQDVSQSLHLLGSIEGYTSIAAPPLDIPPHLRPYLRLMDASEAQITECARHSFRRRP

SEQ ID NO: 143 - protein, 548 aa, Unknown
  Description of Unknown: terrestrial-soil-vadose zone soil sequence
MTRKLNNPDMPTLAYKYDVRIIGDLPQEIWDTGKAMNALYSDLAERHEAFCGAFKDASKEMRKEQFAKLTKNGKGGILYERAKASKDALNFRYYYTVHEQFRKSQQRFAKRQGGAPKPKRCLERMLFPMEFGSFSEPTTWIHSNSENRAYVREAQGPTRGHFVIHTPYDEITIPFEIVMDRPLPDGALIKGIALSGFHERPFEWKWSLVFSLQVPPHPKAPSVGRVAGLDLGWRDMGDCIRIGMLADSAGDFRELRLPYDLSRNQDRKFIKRLESQGVVDRPMLRDIRLIRDAQRKMDDHLEACKIDLAGVDRSVWPDEARASMAGVVKMRAGGLQRIRRTLFEAGISYEFLEDWHFWHDTNLRRYRAAQIDWIAARDYIYRCIAAWIADNYDTVAWEGDLGLKRMAEAAGKRKKARKEEHEETGEWQERTVDDRISEASQKRRQWASLHTLRGYIAEAMKKRGRDLQGHPAAYSTQTCDECGQHIAPGHELIRECAERHVEDQDATAALYYLRIVQDYLRAVTGFSASVNHSQLLKAIKPISPMNAA

SEQ ID NO: 144 - protein, 548 aa, Unknown; identical to SEQ ID NO: 143
  Description of Unknown: terrestrial-soil-vadose zone soil sequence

SEQ ID NO: 145 - protein, 541 aa, Unknown
  Description of Unknown: wastewater metagenome sequence
MRTTKTPDYSNKNLSFWCEPVGEMPSVVFEKGRQMNRLWNLLVECHTTFLAKHDGKKGGERTEAYKTEWQPLLKRIYNNEAKSFGLNSDETNFVTDGFKNAIRAGYDQKRPGAGMPTFKARLRSIHIPFCDRNGGRAPAWFFEKPDRRIHLRPILLPDAAKRVIDRGPARGHFTVDGQAISLRANLSQSIPPGALVKRVSLVGKLERPFGWQWKLMFSIAYPPPPPAQSDAACVGVDLGYRRFEDRIRFGMIFDGSRFHELALPLDLTNRRAAKAGKRWDIREIWELESQIGCGVEACKASLKQLPKTDWPEEARGAMQGIAKMRERGLLKVRRLLRDAEITVPELETWWDDYQRLFRKSRHLELQIVATRTHLYRNLALSLARSCAAIAWEGGLSLRDLAESAGKKKKQRKEDIAEGVSAERSPEDRIEEAAQKWRAYVCLSDFRRFLKEAVEKTTAALIDRPAAGTTNTCEECGAPVDTGPDLVLTCANGHRRDQDKGSAKMLFEEIDEGYRQQSAPLSLDLFTDQAVRAIRTLNREMV

SEQ ID NO: 146 - DNA, 38 bp, Artificial Sequence
  Description of Artificial Sequence: Synthetic oligonucleotide
agtcgcgaataactgttcagcggagaagccgctgaaac

SEQ ID NO: 147 - DNA, 36 bp, Artificial Sequence
  Description of Artificial Sequence: Synthetic oligonucleotide
gtgattgcagactggtcgtgcgaatgcgcacggcac

SEQ ID NO: 148 - DNA, 37 bp, Artificial Sequence
  Description of Artificial Sequence: Synthetic oligonucleotide
agtaattgaaagttggtcgtgcgaatccgcacggcac

SEQ ID NO: 149 - DNA, 37 bp, Artificial Sequence
  Description of Artificial Sequence: Synthetic oligonucleotide
gttgcagtggttgtccatcgggattgagcgatggaac

SEQ ID NO: 150 - DNA, 37 bp, Artificial Sequence
  Description of Artificial Sequence: Synthetic oligonucleotide
gtttcaatattaggtccagccggagtcaggctggaac

SEQ ID NO: 151 - DNA, 37 bp, Artificial Sequence
  Description of Artificial Sequence: Synthetic oligonucleotide
gtttcaacattaggtccagccggagtcaggctggaac

SEQ ID NO: 152 - DNA, 20 bp, Artificial Sequence
  Description of Artificial Sequence: Synthetic oligonucleotide
ttcggatcatccgaagattt

SEQ ID NO: 153 - DNA, 36 bp, Artificial Sequence
  Description of Artificial Sequence: Synthetic oligonucleotide
gtgactgcagactggtcgtgcgaatgcgcacggcac

SEQ ID NO: 154 - DNA, 31 bp, Artificial Sequence
  Description of Artificial Sequence: Synthetic oligonucleotide
gtgactgcagactggtcgtgcgaatgcgcac

SEQ ID NO: 155 - DNA, 37 bp, Artificial Sequence
  Description of Artificial Sequence: Synthetic oligonucleotide
gttgcagatattggtccagccggggttgggctggaac

SEQ ID NO: 156 - DNA, 37 bp, Artificial Sequence
  Description of Artificial Sequence: Synthetic oligonucleotide
agtgattgaaggctggtcgtgcgaatgcgcacggcac

SEQ ID NO: 157 - DNA, 23 bp, Artificial Sequence
  Description of Artificial Sequence: Synthetic oligonucleotide
gccgtgcgaatgcgcacggcatg

SEQ ID NO: 158 - DNA, 36 bp, Artificial Sequence
  Description of Artificial Sequence: Synthetic oligonucleotide
gtaattgaaagttggtcgtgcgaatccgcacggcac

SEQ ID NO: 159 - DNA, 36 bp, Artificial Sequence
  Description of Artificial Sequence: Synthetic oligonucleotide
gtgacaactcttgctcaaccgagtctcggttgagac

SEQ ID NO: 160 - DNA, 36 bp, Artificial Sequence
  Description of Artificial Sequence: Synthetic oligonucleotide
gtgattgaaggctggtcgtgcgaatgcgcacggcac

SEQ ID NO: 161 - DNA, 29 bp, Artificial Sequence
  Description of Artificial Sequence: Synthetic oligonucleotide
cgtagcaattgatgttcaatggatgagcc

SEQ ID NO: 162 - DNA, 37 bp, Artificial Sequence
  Description of Artificial Sequence: Synthetic oligonucleotide
gtcgcgaataactgttcagcggagaagccgctgaaac

SEQ ID NO: 163 - DNA, 526 bp, Unknown
  Description of Unknown: wastewater metagenome sequence
acgaagggttggccacgtttgtggagccgtggccgggcgatgatgtggccgtatacgtgaaagatgaagccgagaatgtgaaacaggtgttggcggtgaccaaggccgccgggctgacgccgattgggtttgtgaaaacggaagggctgtaatctcgccttgatattggcttaatttcaggttgaaagtaagaacgggacacataatgagaacaaccaaaacccctgattattccaataaaaatctgtccttctggtgtgagccggtcggcgaaatgccgagtgtggtttttgaaaagggtcggcagatgaaccggctctggaatctgctggttgagtgtcacactacgtttctccaccgacgggatcaagacaagggttccgcgaaaatgctatttgaagagattgacgaaggttatcggcagcaatcggccccgctaagcctggatttgtttacggatcaggcggttcgcgccattcgcaccttaaatcgcgagatggtttgagttatagggctgactactctc

SEQ ID NO: 164 - DNA, 1237 bp, Unknown
  Description of Unknown: soil metagenome sequence
aaacagtggcgagagccatattattgggccgccttcgttctgcagggtgaatggaaatagcgatgggcgcgtcaatttctcggaagaagggatggggtgtcgcgcgacatagatgaaaatgcaatgatgcggcaggagttcagcaaagtgcaggcgcaatccggaggcatagacagaaggccccttccgtgattacattagtcttcgcgccttcgattgccggttataaaccgatagctccctttcgcaaaatttatggaagatatatccaagaagccggagcggcgtaaaaacttcgcgcgccgagaacggctgaacaaagattggccgtttaaggtctacccctacagatgcatgctgcgggagaaaccgccccaagcgctgtgggacacagcgcgtgagatggacgtgaccacaagcctatacctgctgagtaagatagaaggctacgcaagcgccagtggccctcctattgaaattccggcgcatctgagccaatacttgcgagtgatgcacgcaagtgaagtgcggcttgagattgttgaaaagcattgacactcccaccgctggaagcggcgggattcttgcttcaacgcgaacggcctgccgtggcaggtcttacactcgctccacaagcgttttgactctccgcgtgccccgcggcgaggagaatgttgattccttcgtttctgatgtttttggccgcgttacgatctcgatcatgccgcgcgccgcaattgacggatttgcctgtttgttgataggcctcctttcggcgcgccaacgcccagttgaagacgaatctgcgcgcgcccgcgaaacgggcgaaagccgtctcctcgtcggcggtcggatcgagcctgaatctgtagacctttcgttccggcattcaatctctagtgccctgcgagttgatgtattcgccaaatccacgtcgtgggcgggcatcggggagtcaatggcgttacgcgttgcttcgcgccgcgcctgtcatccccccgctggaagcggagggctttctttggctttttttgaaagtggctaaggtgcccatcacagttcgaaaaagtaattgaaatggtgatctatgttcaatcaaaccgtaccagtcgcaaacccgcagggtaggcggggagcgactgcccgccacaccgttcagattatcaacctgatcctttgggctggattgtcagtttctccatgcctgtggccaggggcggagcctgcgcaagcctcc

SEQ ID NO: 165 - DNA, 644 bp, Unknown
  Description of Unknown: wastewater metagenome sequence
gaagggttggccacgttagtggagccgtggccgggcgatgatgtggccgtatacgtgaaagatgaagccgagaatgtgaaacaggtgttggcggtgaccaaggccgccgggctgacgccgattgggtttgtgaaaacggaagggctgtaatctcgccttgatattggcttaatttcaggttgaaagtaagaacgggacacataatgagaacaaccaaaacccctgattattccaataaaaatctgtccttctggtgtgagccggtcggcgaaatgccgagtgtggtttttgaaaagggtcggcagatgaaccggctctggaatctgctggttgagtgtcacactacgtttctccaccgacgggatcaagacaagggttccgcgaaaatgctatttgaagagattgacgaaggttatcggcagcaatcggccccgctaagcctggatttgtttacggatcaggcggttcgcgccattcgcaccttaaatcgcgagatggtttgagttatagggctggcagagccgttgaaatactctcgtcaaagatcaaaagttagtttggcaataaatgtggctttactttataacctagtagtgttatagttcacccgttgttggatgtgcttaacttttacaactttggtg

SEQ ID NO: 166 - DNA, 864 bp, Unknown
  Description of Unknown: soil metagenome sequence
aaacagtggcgagagccatattattgggccgccttcgttctgcagggtgaatggaaatagcgatgggcgcgtcaatttctcggaagaagggatggggtgtcgcgcgacatagatgaaaatgcaatgatgcggcaggagttcagcaaagtgcaggcgcaatccggaggcatagacagagagccccttccgtgattacattagtcttcgcgccttcgattgtcggttattaaccgatagctccctttcgcaaaatttatggaagatatatccaagaagccggagcggcgtaaaaaccccgcgcgccgagagcgactgaacaaagattggccaattaaggtccataactatagatgctcgctgaatgagaaaccgccccagacgctctgggatacggcgcacgagatggatcaggacgtgaccacaagcctatacctgctgagtaagatagaaggctgcgcaagcgccagtggccctcctattgaaattccagcgcatctgagcccatacttgcgagtgatgaccgcaagtgaagtggctcttgagattgttgaatagcatgaaagtggctaaagtacccatcaaagttcgaaaaagtaattgaaatggtgatctatgttcaatcaaatcgtaccagtcgcaaacccgcagggtaggcggggagcgactgcccgccacaccgttcaaattatcaacctgatcctttgggctggattgtcagtttctccatgcctgtggccaggggcggagcctgcgcaagcctccgctagtgaacgcggcgcggcgcgccgcgttcaggagagtatttcgctggaaccgggcaagccgatcgagcgagagccctccggcggcgagtcgcattcctac

SEQ ID NO: 167 - DNA, 1861 bp, Unknown
  Description of Unknown: aquatic-freshwater-peatland sequence
gcaacgatgttctttgtatatgccaggctgttcttttctccggccgcttctttggggcagacaagcaaaatggtcgcgttggatgacctgaggtcaattagagaattgtccctagcgagatccaggagccgttcgagcttcttaaccaaactgcccgtacttctcacagagcggtttgggatcggacgccgcgcaaggtatcgcctcatgtaatcggggttcgctttacgccatttccgctggctgcgacggcactgttccttgtaggcaggatcggtgtcgagtttccatcggtgatagtccgcgcggcgtcgacgttggcattcgccggagccgcagactttctgattaggatgatagcgggatggcttaaatcttcgtttgcagtaaggacatgtcttttgtcgcatacgatttgtggaagcagtctgtgttagaactacttcggaggggagagcgaggcgccaattagacgttcactcagcaaccgcgccctgtataatgagagcggaatgggatattgataatcgtgctcagcgtcctaggacaggtgggctggacaccgtcccggcgcttgagtgagtggtgaagatagctcacggcatcgaagaatgtccgcaaggacgatagaggaaagaaaaggcaaaaccagcatgcagagagagcgcaagcgcaaaaagacccacgacataaggccacataagtaccgcgcatggttcgccgaaggtgatggaacccggctgccggagcccatctttgcgacctgcgcggcttgcggctcgcatttcgaagcgggggccgggctcatggggcgctgcgagcaggggcacgtgatggaccaggactggaatgcggccgggaacatctacgcaggccgagcgggcgccaccgcgcaagcggcagtcgggtaagaatgggggcggcacgaggaggcgaccaggtgcgtttgcatcccgcgtggggggtcggcacatcagagtccagccgtacgcaggctggggctagcaactgatgcactggggggtaagaacgggtatttgcgaaaagggtcatgctacgggccaggaccttgacggagcagagagcaactacgcaaaccggggcggggctgccgccgccgcggggtttgcgtaaaagctgtgccgacaaatgcgccaaatatatgttagtgttgtgggttgtggagcggttcgtgcttccctcgcggcgggaatcggtcagatgctgcgggatcaattatccgttttcggatctgcttgacgcacgcgctccgaaagctcaccatttacacaagacctcgacgggatcggtctggcaagcgacgaccctgacacctgcggagatggcgtcgatcagctactccgattcagagcaatccagtagcagaatggaacgtgtggttggggcagaagcgcgcagctctcgaacgaccttaacaccccctggggaccaccttccagattcgagctgatcacagctgcattcgggcgatactcggctacttgctcaaaaactcctttggtgtgtgtttagcccccaacaaccaagtgcttgcgctgctttttgagcgcacggcacagcaccttgccgaccagcgctgtgcgttgggcgacgacaactgatataggcacgggcgtgattccctcctaacccgaagttccaagaggctgcagagagtattctactgattcactgagagatagtagcaaactcaatttcccgttactgggaacgtacgaatcagttcgcgcgcccgcgcttgtaggggtgtgggagtcggcacctgttggcaggtcaggctcgcgtctcccgatttgatctgataggtgaccctcgcccggctggccaactcggcgagcag

SEQ ID NO: 168 - DNA, 1700 bp, Unknown
  Description of Unknown: aquatic-freshwater-bog sequence
aaccaattgaaggctgcatagaatagtggccagcgccatcttctcaaaacggcaattcagcttgctcgccgcagcaggcgacaatcgcttgctgccgaaatgttgagaggcctcgcgaatgtgggctgcgagattacgtatgcttttcattttgtttggttcggactagactcaatatcctatgcaaagggagcgcaagcgcaaggagagccacgacataaggccacacaagtaccgggcgtggttcgccgagggcgacgggaccaggcttcccgagcctgtctatttgcttgcaaagcgcatgcaggattgctggacggacattgcgctcacatgcgcggcttgcggctcgcatttcgaggcgggggccgggctcatggggcgctgcgagcaggggcacgtgatggaccaggactggaatgcggccgggaacatctacgcaggccgagcgggcgccacggcgcaagcggcagtcgggtaagaatgggggcggcgcgaggaggcgaccaggtgcgtttgcatccggcgtggagggtcggcacatcagagtccagccgcacccaggctggggcaagcaactgatgcacaggggtgtaagaacgggtacttgcgaaaagggtcatgctatgggccaggaccttgacggagcagagagcaattgcgcaaaccggggcggggctgccgccgccgcggggtttgcgtaaaatctgtgccgacaaatgcgccaaatatatgttagtgttgtgggttgtggagcgcttcatggaaatgaatcactgcgaatctcttcgcaagattcaaatactgaactgattaaacgtcagctacgggctgtccgatagtatggcgcaatgataccggtgatggagatgttacaatctgcgtgaatagtggggacgaagtacaagtagacggccccggcggcagtacgtcaattggaaccgatcacgttctgccccccatcgccgcaaagggatcatgataaagtgtcgtcattttgcagcctgcggcgccccgcgaccgcgttcagatcccgtgattcgacctccaatggcatgcttctccttgggccctgcgcgactgtagcttccgacttgttcactatcctcctgcttcgtctgaccctcgctcgattttacttttatggtaagattgcctccatctggccgctggggctctggtggagatcgtgtgattacggcaaaggacacgagcaatccagtaggaggatggaacgcgtagttggggcagaagcgcgcagctctcgaacgaccttaacacccgcctggggattaccttccagattcgagctgatcacagctacattcggttgatactcaactacgtgctcaaaaaacttctttggtgtgtgttcagcccacaacaaccaagcgcctgcgctgctctttgagcgcacggaccagcaccttgccgaccagcgctgtgcgttgggcgacgataactgatataggccagggcgtgattccttcctaaccgctccggtattgtccggggtagcccgctgatcgctgaacagaagtctcgtagcctcatttagcaggagcagttcgctggtcggccatcaccacgcgcccctcgccgactgagaggatgctatccgccaactcccagacaagtgctgtatggcagataaagatcatttggtggaatccgccaagatccatggcacggcgcagcat

SEQ ID NO: 169 - DNA, 504 bp, Unknown
  Description of Unknown: terrestrial-soil-fen sequence
agaggctgacaccgcaccgcagcagcctcaactgcccgtctggttgacggcgctgaaccccaggcgcatcactgcctgggtctacgaactgagtaacggagtacgcttcgaagcacgcggcggcggatgggtgcagcaaggcgggagaaattcggagtgggtctataccaccacgaacggtccgcgagatttcggtgtcgctggttaacaacggcttctactcgaccgggcgacgggaaagttgtaacacgcgcgccagtgggatattcgtttctatagaaacactgtgagcgatgtgacgttttatttcgaattgattagaagcctgttggagcagcaatgaaacctaaaaagaacgccgacacgatctaccaaacctacaaattctggatcaagccgagcgaccccctgcctcaattattgtgggacaaagcgaaggccatgaatgccgcgtggacgagtttagtcctcatgcgtcaggagacgctggtgagaaacctaacc

SEQ ID NO: 170 - DNA, 443 bp, Unknown
  Description of Unknown: terrestrial-soil-tropical forest soil sequence
cggttataaaccgatagctccctttcgcaaaatttatggaagatatatccaagaagccggagcggcgtaaaaaccccgcgcgccgagaacgactgaacaaagattggccaattaaggtccataactataggtgctcgccgaatgagaaaccgccccaggcgctctgggacacggcgcacgaaatggatcaggatgtaactgcaagtctgtacttgctgagtaagatagaaggctacgcaagcatcagtggccctcctattgaaattccggcgcatctgagcccttacttgcgggtgatgaccgcaagtgatgtggctcttgagattgttgaatagctgaaagtggctaaggtagtcgcacgtgaaaaagtgtaaaagccaataaaaacggcatgttcatcgagaatcacaccgtgtagaattgcaagaaagcagtagaaacct

SEQ ID NO: 171 - DNA, 1416 bp, Unknown
  Description of Unknown: aquatic-freshwater-peatland sequence
cggaggggagagcgaggcgccaattagacgttcactcagcaaccgcgccctgtataatgagagcggaatgggatattgataatcgtgctcagcgtcctaggacaggtgggctggacaccgtcccggcgcttgagtgagtggtgaagatagctcacggcatcgaagaatgtccgcaaggacgatagaggaaagaaaaggcaaaaccagcatgcagagagagcgcaagcgcaaagagactcacgacataaggccacataagtaccgcgcatggttcgccgaaggtgatggaacccggctgccggagcccatctttgcgacctgcgcggcttgcggctcgcatttcgaagcgggggccgggctcatggggcgctgcgagcaggggcacgtgatggaccaggactggaatgcggccgggaacatctacgcaggccgagcgggcgccaccgcgcaagcggcagtcgggtaagaatgggggcggcacgaggaggcgaccaggtgcgtttgcatcccgcgtggggggtcggcacatcagagtccagccgtacgcaggctggggctagcaactgatgcactggggggtaagaacgggtatttgcgaaaagggtcatgctacgggccaggaccttgacggagcagagagcaactacgcaaaccggggcggggctgccgccgccgcggggtttgcgtaaaagctgtgccgacaaatgcgccaaatatatgttagtgttgtgggttgtggagcggttcgtgcttccctcgcggcgggaatcggtcagatgctgcgggatcaattatccgttttcggatctgcttgacgcacgcgctccgaaagctcaccatttacacaagacctcgacgggatcggtctggcaagcgacgaccctgacacctgcggagatggcgtcgatcagctactccgattcagagcaatccagtagcagaatggaacgtgtggttggggcagaagcgcgcagctctcgaacgaccttaacaccccctggggaccaccttccagattcgagctgatcacagctgcattcgggcgatactcggctacttgctcaaaaactcctttggtgtgtgtttagcccccaacaaccaagtgcttgcgctgctttttgagcgcacggcacagcaccttgccgaccagcgctgtgcgttgggcgacgacaactgatataggcacgggcgtgattccctcctaacccgaagttccaagaggctgcagagagtattctactgattcactgagagatagtagcaaactcaatttcccgttactgggaacgtacgaatcagttcgcgcgcccgcgcttgtaggggtgtgggagtcggcacctgttggcaggtcaggctcgcgtctcccgatttgatctgataggtgaccctcgcccggctggccaactcggcgagcag

SEQ ID NO: 172 - DNA, 1640 bp, Unknown
  Description of Unknown: soil metagenome sequence
cctcttcccttaactgttttcctcccgtggcggattccgttctgatgccatcgagtttttcgccactgctcttcgtcaatgagacgatctgcccggagaatttttcaagttgaattttctcggcacccgccaaatctttaattgtcttggacatcgtttcggaaatactgttgagcgtggtaacaacttcttctcgaaggtgctgggcactagcggcggactcggtacgaccacagtcgagcctttcgacgctggtttgggcaaaggcggcaagctgggttgcaaatccttcaaactgtgacttttgggctgaagccagaccgcttatcgtttttgttatcgtctcggaaatggtgctgagagtcgctactacttcttcccgtagttgcttggctcccgtggcggattcggtgcgaacaccatccaatcgcgcaccgctcgctttagcgaacgaggcaagctgctcagagaaagcgtcaagttggcttttctggacattagcccactcccgcatcgtccccgtcgtcgtctccgagatgctagtcagcgttgccacgacttcctgccgctgctccttcgcggccttacccagttcgaccctactctgggcaacttcctcacccagttcgtccctactctgggcaacttcctctctgactgcacgctcggtgcgttcttgagccttttcaaaagcatccagacgggaatcgagcattggcgagccgactttggatgttttcatcaaaagggcaaggagaagagccaccacaacgaccagcaggacgagagtcacgacaggcataaatttgaagtctttccgagtagggacgattatcgaacccactcatcagggtcgggggttcaagccgcagccagttgtctcagtctgggttcccttggagtgttggctgaggttcaagtcgccggggaagaaaatgcgaccagtatgtaaccttaacgcaagaacctaccgaaactcgtgacccaaatcacagtctgtggtgactggaaacaccaaggccccaaacactccggaggcaatcaaagtggcagcacgcgggtcaccctttcgctggcggaacgtgatgcccaagatcggcgtatcgccgccgtcgctgaaacactaggagggaaggctttttgaattagggacgagaaatccacattaaattcacattgaaatcgtgctacatttcggcggatatgtagagccgagtgacggctttcggctggaaacgtatactacgattatgcgagagcgtaagcgccaagagacgcacggacagatggcttataagtttcgtgcctacgtcaccggaacagacgccagccacgggcagatgttgcccccggcgatttacaccgtcgctaagaacatggagaactgctggtcggacatcgccaatcataacgagcaagaatacggggcttggaagatctgttccgaatgtggggctttgtttgaagcaggtagcgagattataggacgttgcacgcgggggcacgaaaaagaccaagattggaatgcagccgagaacatttacgcatactccagcgctccagtcgcagaactattatctgcgtaaaaacgcaggcgaaggatgctctttgacaattcattttgtgcaacttgtggagcg

SEQ ID NO: 173 - DNA, 990 bp, Unknown
  Description of Unknown: aquatic-freshwater-peatland sequence
acctgcgcggcttgcggctcgcatttcgaagcgggggccgggctcatggggcgctgcgagcaggggcacgtgatggaccaggactggaatgcggccgggaacatctacgcaggccgagcgggcgccaccgcgcaagcggcagtcgggtaagaatgggggcggcacgaggaggcgaccaggtgcgtttgcatcccgcgtggggggtcggcacatcagagtccagccgtacgcaggctggggctagcaactgatgcactggggggtaagaacgggtatttgcgaaaagggtcatgctacgggccaggaccttgacggagcagagagcaactacgcaaaccggggcggggctgccgccgccgcggggtttgcgtaaaagctgtgccgacaaatgcgccaaatatatgttagtgttgtgggttgtggagcggttcgtgcttccctcgcggcgggaatcggtcagatgctgcgggatcaattatccgttttcggatctgcttgacgcacgcgctccgaaagctcaccatttacacaagacctcgacgggatcggtctggcaagcgacgaccctgacacctgcggagatggcgtcgatcagctactccgattcagagcaatccagtagcagaatggaacgtgtggttggggcagaagcgcgcagctctcgaacgaccttaacaccccctggggaccaccttccagattcgagctgatcacagctgcattcgggcgatactcggctacttgctcaaaaactcctttggtgtgtgtttagcccccaacaaccaagtgcttgcgctgctttttgagcgcacggcacagcaccttgccgaccagcgctgtgcgttgggcgacgacaactgatataggcacgggcgtgattccctcctaacccgaagttccaagaggctgcagagagtattctactgattcactgagagatagtagcaaactcaatttcccgttactgggaacgtacgaatcagttcgcgc

SEQ ID NO: 174 - DNA, 219 bp, Unknown
  Description of Unknown: terrestrial-soil-tropical forest soil sequence
acccaatgccagtccagcatgtgcagagaacaccaatgattgaagagaagactgctaagcgtaaaaacccagtcaggcgagagcgcctgaacaaagactggccgatcaaggtctacacctatgactgttggccgcaagaaaagccgctcaaggcgctatgggacacggcgcatgagatgaggcggtctgatgcgttggaatatttgcggggattgattg

SEQ ID NO: 175 - DNA, 24 bp, Artificial Sequence
  Description of Artificial Sequence: Synthetic oligonucleotide
aaacaacctttagaatttttttca

SEQ ID NO: 176 - DNA, 24 bp, Artificial Sequence
  Description of Artificial Sequence: Synthetic oligonucleotide
gaactcaacgcggatgccattgtt

SEQ ID NO: 177 - DNA, 24 bp, Artificial Sequence
  Description of Artificial Sequence: Synthetic oligonucleotide
gctcgggtacttggcgaaacactg

SEQ ID NO: 178 - DNA, 24 bp, Artificial Sequence
  Description of Artificial Sequence: Synthetic oligonucleotide
tacaagacgcgtgctatggttacc

SEQ ID NO: 179 - DNA, 24 bp, Artificial Sequence
  Description of Artificial Sequence: Synthetic oligonucleotide
aacaatggcatccgcgttgagttc

SEQ ID NO: 180 - DNA, 36 bp, Artificial Sequence
  Description of Artificial Sequence: Synthetic oligonucleotide
gtgccgtgcggattcgcacgaccaactttcaattac

SEQ ID NO: 181 - DNA, 26 bp, Artificial Sequence
  Description of Artificial Sequence: Synthetic oligonucleotide
ataactgttcagcggagaagccgctg

SEQ ID NO: 182 - DNA, 24 bp, Artificial Sequence
  Description of Artificial Sequence: Synthetic oligonucleotide
tggtcgtgcgaatgcgcacggcac

SEQ ID NO: 183 - DNA, 24 bp, Artificial Sequence
  Description of Artificial Sequence: Synthetic oligonucleotide
tggtcgtgcgaatccgcacggcac

SEQ ID NO: 184 - DNA, 77 bp, Artificial Sequence
  Description of Artificial Sequence: Synthetic oligonucleotide
ttgggtttgtgaaaacggaagggctgtaatctcgccttgatattggcttaatttcaggttgaaagtaagaacgggac

SEQ ID NO: 185 - DNA, 50 bp, Artificial Sequence
  Description of Artificial Sequence: Synthetic oligonucleotide
tgtcttgatcccgtcggtggagaaacgtagtgtgacactcaaccagcaga

SEQ ID NO: 186 - DNA, 64 bp, Artificial Sequence
  Description of Artificial Sequence: Synthetic oligonucleotide
tctacacctatgactgttggccgcaagaaaagccgctcaaggcgctatgggacacggcgcatga

SEQ ID NO: 187 - DNA, 65 bp, Artificial Sequence
  Description of Artificial Sequence: Synthetic oligonucleotide
ggtctacacctatgactgttggccgcaagaaaagccgctcaaggcgctatgggacacggcgcatg

SEQ ID NO: 188 - DNA, 96 bp, Artificial Sequence
  Description of Artificial Sequence: Synthetic oligonucleotide
acttgcgagtgatgcacgcaagtgaagtgcggcttgagattgttgaaaagcattgacactcccaccgctggaagcggcgggattcttgcttcaacg

SEQ ID NO: 189 - DNA, 80 bp, Artificial Sequence
  Description of Artificial Sequence: Synthetic oligonucleotide
ctacagatgcatgctgcgggagaaaccgccccaagcgctgtgggacacagcgcgtgagatggacgtgaccacaagcctat

SEQ ID NO: 190 - DNA, 45 bp, Artificial Sequence
  Description of Artificial Sequence: Synthetic oligonucleotide
tagttcacccgttgttggatgtgcttaacttttacaactttggtg

SEQ ID NO: 191 - DNA, 65 bp, Artificial Sequence
  Description of Artificial Sequence: Synthetic oligonucleotide
gtttgtgaaaacggaagggctgtaatctcgccttgatattggcttaatttcaggttgaaagtaag

SEQ ID NO: 192 - DNA, 2774 bp, Artificial Sequence
  Description of Artificial Sequence: Synthetic polynucleotide
ccccttgtattactgtttatgtaagcagacaggatgcgtccggcgtagaggatcgagatctccaaaaaatggctgtttttgaaaaaaattctaaaggttgttttacgacagacgataacagggttgaaataattttgtttaactttaagaaggagatttaaatatgaaaatcgaagaaggtaaaggtcaccatcaccatcaccacggatccatgacggcattgacggaaggtgcaaaactgtttgagaaagagatcccgtatatcaccgaactggaaggcgacgtcgaaggtatgaaatttatcattaaaggcgagggtaccggtgacgcgaccacgggtaccattaaagcgaaatacatctgcactacgggcgacctgccggtcccgtgggcaaccctggtgagcaccctgagctacggtgttcagtgtttcgccaagtacccgagccacatcaaggatttctttaagagcgccatgccggaaggttatacccaagagcgtaccatcagcttcgaaggcgacggcgtgtacaagacgcgtgctatggttacctacgaacgcggttctatctacaatcgtgtcacgctgactggtgagaactttaagaaagacggtcacattctgcgtaagaacgttgcattccaatgcccgccaagcattctgtatattctgcctgacaccgttaacaatggcatccgcgttgagttcaaccaggcgtacgatattgaaggtgtgaccgaaaaactggttaccaaatgcagccaaatgaatcgtccgttggcgggctccgcggcagtgcatatcccgcgttatcatcacattacctaccacaccaaactgagcaaagaccgcgacgagcgccgtgatcacatgtgtctggtagaggtcgtgaaagcggttgatctggacacgtatcagtaataaaaagcccgaaaggaagctgagttggctgctgccaccgctgagcaataactagcataaccccttggggcctctaaacgggtcttgaggggttttttgctgaaaggaggaactatatccggcttcctcgctcactgactcgctgcgctcggtcgttcggctgcggcgagcggtatcagctcactcaaaggcggtaatacggttatccacagaatcaggggataacgcaggaaagaacatgtgagcaaaaggccagcaaaaggccaggaaccgtaaaaaggccgcgttgctggcgtttttccataggctccgcccccctgacgagcatcacaaaaatcgacgctcaagtcagaggtggcgaaacccgacaggactataaagataccaggcgtttccccctggaagctccctcgtgcgctctcctgttccgaccctgccgcttaccggatacctgtccgcctttctcccttcgggaagcgtggcgctttctcatagctcacgctgtaggtatctcagttcggtgtaggtcgttcgctccaagctgggctgtgtgcacgaaccccccgttcagcccgaccgctgcgccttatccggtaactatcgtcttgagtccaacccggtaagacacgacttatcgccactggcagcagccactggtaacaggattagcagagcgaggtatgtaggcggtgctacagagttcttgaagtggtggcctaactacggctacactagaagaacagtatttggtatctgcgctctgctgaagccagttaccttcggaaaaagagttggtagctcttgatccggcaaacaaaccaccgctggtagcggtggtttttttgtttgcaagcagcagattacgcgcagaaaaaaaggatctcaagaagatcctttgatcttttctacggggtctgacgctcagtggaacgaaaactcacgggtggcacttttcggggaaatgtgcgcggaacccctatttgtttatttttctaaatacattcaaatatgtatccgctcatgaattaattcttagaaaaactcatcgagcatcaaatgaaactgcaatttattcatatcaggattatcaataccatatttttgaaaaagccgtttctgtaatgaaggagaaaactcaccgaggcagttccataggatggcaagatcctggtatcggtctgcgattccgactcgtccaacatcaatacaacctattaatttcccctcgtcaaaaataaggttatcaagtgagaaatcaccatgagtgacgactgaatccggtgagaatggcaaaagtttatgcatttctttccagacttgttcaacaggccagccattacgctcgtcatcaaaatcactcgcatcaaccaaaccgttattcattcgtgattgcgcctgagcgagacgaaatacgcgatcgctgttaaaaggacaattacaaacaggaatcgaatgcaaccggcgcaggaacactgccagcgcatcaacaatattttcacctgaatcaggatattcttctaatacctggaatgctgttttcccggggatcgcagtggtgagtaaccatgcatcatcaggagtacggataaaatgcttgatggtcggaagaggcataaattccgtcagccagtttagtctgaccatctcatctgtaacatcattggcaacgctacctttgccatgtttcagaaacaactctggcgcatcgggcttcccatacaatcgatagattgtcgcacctgattgcccgacattatcgcgagcccatttatacccatataaatcagcatccatgttggaatttaatcgcggcctagagcaagacgtttcccgttgaatatggctcataaca

SEQ ID NO: 193 - DNA, 2771 bp, Artificial Sequence
  Description of Artificial Sequence: Synthetic polynucleotide
ccccttgtattactgtttatgtaagcagacaggatgcgtccggcgtagaggatcgagatctccaaaaaatggctgtttttgaaaaaaattctaaaggttgttttacgacagacgataacagggttgaaataattttgtttaactttaagaaggagatttaaatatgaaaatcgaagaaggtaaaggtcaccatcaccatcaccacggatccatggtcagcaagggggaggaagacaatatggctattatcaaggaattcatgcgcttcaaggtgcatatggaaggaagcgtgaatggacacgaattcgagatcgaaggcgagggggagggtcgcccttatgaaggcacacaaacagctaaactgaaagtgacgaagggagggccgcttcccttcgcttgggacattctttcaccccagttcatgtatggttcaaaggcttatgtcaagcacccggcggacattccagactacttaaaattgtcgttccccgaggggtttaaatgggaacgcgttatgaatttcgaggatgggggagtcgtaacggttacccaggacagtagcctgcaggatggcgagttcatctacaaagtgaaattgcgcgggacgaacttccctagcgatgggccagtcatgcagaagaaaacgatgggatgggaagcgtcatccgagcgcatgtatcctgaagatggtgctttaaaaggtgagatcaagcagcgtttgaaactgaaggacgggggccattatgatgctgaagttaaaacgacatataaggccaagaagccagttcaactgccaggggcttataatgttaatattaaattagacattacgagccataatgaagattacacgattgtcgagcaatacgagcgcgcagaaggacgccactcaacggggggcatggacgagctgtacaagtaaaaagcccgaaaggaagctgagttggctgctgccaccgctgagcaataactagcataaccccttggggcctctaaacgggtcttgaggggttttttgctgaaaggaggaactatatccggcttcctcgctcactgactcgctgcgctcggtcgttcggctgcggcgagcggtatcagctcactcaaaggcggtaatacggttatccacagaatcaggggataacgcaggaaagaacatgtgagcaaaaggccagcaaaaggccaggaaccgtaaaaaggccgcgttgctggcgtttttccataggctccgcccccctgacgagcatcacaaaaatcgacgctcaagtcagaggtggcgaaacccgacaggactataaagataccaggcgtttccccctggaagctccctcgtgcgctctcctgttccgaccctgccgcttaccggatacctgtccgcctttctcccttcgggaagcgtggcgctttctcatagctcacgctgtaggtatctcagttcggtgtaggtcgttcgctccaagctgggctgtgtgcacgaaccccccgttcagcccgaccgctgcgccttatccggtaactatcgtcttgagtccaacccggtaagacacgacttatcgccactggcagcagccactggtaacaggattagcagagcgaggtatgtaggcggtgctacagagttcttgaagtggtggcctaactacggctacactagaagaacagtatttggtatctgcgctctgctgaagccagttaccttcggaaaaagagttggtagctcttgatccggcaaacaaaccaccgctggtagcggtggtttttttgtttgcaagcagcagattacgcgcagaaaaaaaggatctcaagaagatcctttgatcttttctacggggtctgacgctcagtggaacgaaaactcacgggtggcacttttcggggaaatgtgcgcggaacccctatttgtttatttttctaaatacattcaaatatgtatccgctcatgaattaattcttagaaaaactcatcgagcatcaaatgaaactgcaatttattcatatcaggattatcaataccatatttttgaaaaagccgtttctgtaatgaaggagaaaactcaccgaggcagttccataggatggcaagatcctggtatcggtctgcgattccgactcgtccaacatcaatacaacctattaatttcccctcgtcaaaaataaggttatcaagtgagaaatcaccatgagtgacgactgaatccggtgagaatggcaaaagtttatgcatttctttccagacttgttcaacaggccagccattacgctcgtcatcaaaatcactcgcatcaaccaaaccgttattcattcgtgattgcgcctgagcgagacgaaatacgcgatcgctgttaaaaggacaattacaaacaggaatcgaatgcaaccggcgcaggaacactgccagcgcatcaacaatattttcacctgaatcaggatattcttctaatacctggaatgctgttttcccggggatcgcagtggtgagtaaccatgcatcatcaggagtacggataaaatgcttgatggtcggaagaggcataaattccgtcagccagtttagtctgaccatctcatctgtaacatcattggcaacgctacctttgccatgtttcagaaacaactctggcgcatcgggcttcccatacaatcgatagattgtcgcacctgattgcccgacattatcgcgagcccatttatacccatataaatcagcatccatgttggaatttaatcgcggcctagagcaagacgtttcccgttgaatatggctcataaca

SEQ ID NO: 194 - DNA, 54 bp, Artificial Sequence
  Description of Artificial Sequence: Synthetic oligonucleotide
ataactgttcagcggagaagccgctgaaacaaacaacctttagaatttttttca

SEQ ID NO: 195 - DNA, 54 bp, Artificial Sequence
  Description of Artificial Sequence: Synthetic oligonucleotide
ataactgttcagcggagaagccgctgaaacgaactcaacgcggatgccattgtt

SEQ ID NO: 196 - DNA, 54 bp, Artificial Sequence
  Description of Artificial Sequence: Synthetic oligonucleotide
ataactgttcagcggagaagccgctgaaacgctcgggtacttggcgaaacactg

SEQ ID NO: 197 - DNA, 54 bp, Artificial Sequence
  Description of Artificial Sequence: Synthetic oligonucleotide
ataactgttcagcggagaagccgctgaaactacaagacgcgtgctatggttacc

SEQ ID NO: 198 - DNA, 54 bp, Artificial Sequence
  Description of Artificial Sequence: Synthetic oligonucleotide
ataactgttcagcggagaagccgctgaaacaacaatggcatccgcgttgagttc

SEQ ID NO: 199 - DNA, 54 bp, Artificial Sequence
  Description of Artificial Sequence: Synthetic oligonucleotide
ataactgttcagcggagaagccgctgaaacaggtgctacatttgaagagataaa

SEQ ID NO: 200 - DNA, 38 bp, Artificial Sequence
  Description of Artificial Sequence: Synthetic oligonucleotide
gtttcagcggcttctccgctgaacagttattcgcgact

SEQ ID NO: 201 - DNA, 36 bp, Artificial Sequence
  Description of Artificial Sequence: Synthetic oligonucleotide
gtgccgtgcgcattcgcacgaccagtctgcaatcac

SEQ ID NO: 202 - DNA, 37 bp, Artificial Sequence
  Description of Artificial Sequence: Synthetic oligonucleotide
gtgccgtgcggattcgcacgaccaactttcaattact

SEQ ID NO: 203 - DNA, 37 bp, Artificial Sequence
  Description of Artificial Sequence: Synthetic oligonucleotide
gttccatcgctcaatcccgatggacaaccactgcaac

SEQ ID NO: 204 - DNA, 37 bp, Artificial Sequence
  Description of Artificial Sequence: Synthetic oligonucleotide
gttccagcctgactccggctggacctaatattgaaac

SEQ ID NO: 205 - DNA, 37 bp, Artificial Sequence
  Description of Artificial Sequence: Synthetic oligonucleotide
gttccagcctgactccggctggacctaatgttgaaac

SEQ ID NO: 206 - DNA, 20 bp, Artificial Sequence
  Description of Artificial Sequence: Synthetic oligonucleotide
aaatcttcggatgatccgaa

SEQ ID NO: 207 - DNA, 36 bp, Artificial Sequence
  Description of Artificial Sequence: Synthetic oligonucleotide
gtgccgtgcgcattcgcacgaccagtctgcagtcac

SEQ ID NO: 208 - DNA, 31 bp, Artificial Sequence
  Description of Artificial Sequence: Synthetic oligonucleotide
gtgcgcattcgcacgaccagtctgcagtcac

SEQ ID NO: 209 - DNA, 37 bp, Artificial Sequence
  Description of Artificial Sequence: Synthetic oligonucleotide
gttccagcccaaccccggctggaccaatatctgcaac

SEQ ID NO: 210 - DNA, 37 bp, Artificial Sequence
  Description of Artificial Sequence: Synthetic oligonucleotide
gtgccgtgcgcattcgcacgaccagccttcaatcact

SEQ ID NO: 211 - DNA, 23 bp, Artificial Sequence
  Description of Artificial Sequence: Synthetic oligonucleotide
catgccgtgcgcattcgcacggc

SEQ ID NO: 212 - DNA, 36 bp, Artificial Sequence
  Description of Artificial Sequence: Synthetic oligonucleotide
gtctcaaccgagactcggttgagcaagagttgtcac

SEQ ID NO: 213 - DNA, 36 bp, Artificial Sequence
  Description of Artificial Sequence: Synthetic oligonucleotide
gtgccgtgcgcattcgcacgaccagccttcaatcac

SEQ ID NO: 214 - DNA, 29 bp, Artificial Sequence
  Description of Artificial Sequence: Synthetic oligonucleotide
ggctcatccattgaacatcaattgctacg

SEQ ID NO: 215 - DNA, 37 bp, Artificial Sequence
  Description of Artificial Sequence: Synthetic oligonucleotide
gtttcagcggcttctccgctgaacagttattcgcgac

SEQ ID NO: 216-300 - skipped (85 entries)

SEQ ID NO: 301 - protein, 387 aa, Unknown
  Description of Unknown: wastewater metagenome sequence
MLKAHVIRLNPTKEQETYFWRCAGVARFTWNWALAELNAAYEKGERPAVGSLKLEFNRLRNEEGFAPFVGEVQSYAYQQAFGDLQKALSSYHDFRKRGMLKPPTSWKGRKDHKPFGWPRFKVRNRSTPAFYLANNGGLRMNGHQVTIQRCPGGPVNMAEPLRFTGKVMGGRVRYRAGHWYLTVQVDVPVEPDPAHTGPAVGLDVGIKVLAFTSDGVIYDNPKALAHYQRKLRLLQRSLSRQTRGGSNYRKTQAKIARLHDRIANIRKHALHQVSHEITRDYGLIGLEDLNVSGMLKNGKLARSISDVALGELRRQIEYKADWRGSRVMIVSRWFPSSKTCNDCGYVMADMLLSVRWWQCPACGAEHDRDGNAAVNIRNEAVKMAGAA

SEQ ID NO: 302 - protein, 345 aa, Unknown
  Description of Unknown: aquatic-freshwater sequence
MNSQSLLAALLDVDNAFKRFFTQGAGYPKFASKYDPWQSFSCPQHVRLEGGQVHLPKLGLMDLVLHRQIPSDGTIKNCVIKRSPTGKYQISLLIERNINEVICAPVIKDQSIGIDLGIKTFAVGSDGYSIQNPRFLSRQLPRLKTEQRKFARMQKDSNNRAKQKKVVAKIHEDVANARHHFIHQESYRLAVKNHATTVMMETLMIKNMVRNHKLARHITDCGWGMFEKALEYKLAERGKNLIKIDTFLPSTKKCRICKTKNTAMTLKDRVFVCGSCGHIEDRDLHAAQNVRDFGYEQYTRSLGTCETVKRSPVSISVGADEFAKGSKKFGTGRLEEAPAIAALAA

SEQ ID NO: 303 - protein, 369 aa, Unknown
  Description of Unknown: aquatic-freshwater sequence
MSRRQLQDHLVKKKKKSKFTWLNEVNSQSLLAALLDVDNAFKRFFTQGAGYPKFASKYDPWQSFSCPQHVRLEGGQVHLPKLGLMDLVLHRQIPSDGTIKNCVIKRSPTGKYQISLLIERNINEVICAPVIKDQSIGIDLGIKTFAVGSDGYSIQNPRFLSRQLPRLKTEQRKFARMQKDSNNRAKQKKVVAKIHEDVANARHHFIHQESYRLAVKNHATTVMMETLMIKNMVRNHKLARHITDCGWGMFEKALEYKLAERGKNLIKIDTFLPSTKKCRICKTKNTAMTLKDRVFVCGSCGHIEDRDLHAAQNVRDFGYEQYTRSLGTCETVKRSPVSISVGADEFAKGSKKFGTGRLEEAPAIAALAA

SEQ ID NO: 304 - protein, 381 aa, Unknown
  Description of Unknown: aquatic-freshwater-aquifer sequence
MNRAHRIRLNPTAEQAAYFWRCAGVARFTWNWALGEYNAALARGEKPSLTALKLEFNRRRSEDRFAPWVGEVQSYAYQYAFQDLQTAISRYHERRQADKLKPPAGWKPRKDGKPFGWPRFKARDNTTPAFGLANNGGIRCTGHQAQIQRCPGPVNMAEELRFDGRILSGRVTYIAGHWYLAVAIELPDPQPEPLPGRVGVDLGIKSLAVTSDGVIYENPKHLRGSQRKLAHLQREFSRRQKGSRNWAKTKAKITRLHARIGNQRREVLHEMTTDLVRTYGTVVVEDLNVSGMLQNHHLAQAVSDASFGEIRRQLEYKASAFGSKVVIADRWYPSSKTCNDCGQIVELTLAERTWTCPRCGVIHDRDLNAARNLRDYSAVTG

SEQ ID NO: 305 - protein, 391 aa, Unknown
  Description of Unknown: aquatic-freshwater-freshwater lake sequence
MRVNKVFRYELKPNEVQKQIMAQHAGSARYAYNWALEKINSKVFNTTNDKKLHALWRQYRPGWWDFSVSKCVPQEALVNLSNSFKNHRVNPGYFKDPVFKKKFIHDSFRLTGTVKVFANHVQLPILGKIRLKEVIDKYLRSLKSKNTKKLSTKDYKKTDRILSATVTRTADRWYVSILVDIDIPEITDIPTGVVGIDFGIKKFLTLSNGLKFDHPKALKKHLKLLKRRQKQKDKKQKGSHNRLKSSLKLARLHAKIANIRRDYLNKITTWLARSKSVIVLENLNLKGMGKWHALAQALADAGFGLFKSMLQYKCQWYGSKLILADRWYGSSKTCSNCGWYYKDLSLKERSWICKSCNTDHDRDLNAAINLKKIGVLSHSRGIYACGDSYAG

SEQ ID NO: 306 - protein, 381 aa, Unknown
  Description of Unknown: aquatic-freshwater-freshwater metagenome sequence
MNRAHRIRLNPTAEQAAYFWRCAGVARFTWNWALGEYNAALARGEKPSLTALKLEFNRRRSEDRFAPWVGEVQSYAYQYAFQDLQTAISRYHERRQADKLKPPAGWKPRKDGKPFGWPRFKARDNTTPAFGLANNGGIRCTGHQAQIQRCPGPVNMAEELRFDGRILSGRVTYIAGHWYLAVAIELPDPQPEPLPGRVGVDLGIKSLAVTSDGVIYENPKHLRGSQRKLAHLQREFSRRQKGSHNWAKTKAKITRLHARIGNQRREVLHEMTTDLVRTYGTVVVEDLNVSGMLQNHHLAQAVSDASFGEIRRQLEYKASAFGSKVVIADRWYPSSKTCNDCGQIVELTLAERTWTCPRCGVIHDRDLNAARNLRDYSAVTG

SEQ ID NO: 307 - protein, 398 aa, Unknown
  Description of Unknown: aquatic-freshwater-freshwater microbial mat sequence
MATVRYRYRLYPTPAQRVALARTFGAVRFVWNQELARSQIHDAKYQGFSAASRRLTAAKKTTDLAWLNAISCVPIQQSLRNLDVSYRNFFRGCKSKGPRRGYPRFKSKYDEQSAEYTRSGFKVEHGKLCLAKLGSIEVRWSRLLPSIPKTATVKLDATGRYFVSFTVEVNAQPLVGGTPVGIDLGIKCFAALSTGEMVQAPSYKRRERKIAHVQRELARRKNGSRRRAVTKKKLARLHAKISDTRRDFLDKLSTRLVRSHDVIVVEDLNVSGMVKNHHLARSISRQGWRAFRTMLESKCTRYGRELQVVNRWTPTSQICSTCGHRWGRLDLSVRQVTCEGCGAAHDRDVNAAKNIVAAGQVETKNGRGGHVRRMVPLGTCAVLDEASTSGPTPESSAF

SEQ ID NO: 308 - protein, 419 aa, Unknown
  Description of Unknown: aquatic-freshwater-freshwater microbial mat sequence
MTTAIERLHGHVLQSMVSCRPMATVRYRYRLYPTPAQRVALARTFGAVRFVWNQELARSQIHDAKYQGFSAASRRLTAAKKTTDLAWLNAISCVPIQQSLRNLDVSYRNFFRGCKSKGPRRGYPRFKSKYDEQSAEYTRSGFKVEHGKLCLAKLGSIEVRWSRLLPSIPKTATVKLDATGRYFVSFTVEVNAQPLVGGTPVGIDLGIKCFAALSTGEMVQAPSYKRRERKIAHVQRELARRKNGSRRRAVTKKKLARLHAKISDTRRDFLDKLSTRLVRSHDVIVVEDLNVSGMVKNHHLARSISRQGWRAFRTMLESKCTRYGRELQVVNRWTPTSQICSTCGHRWGRLDLSVRQVTCEGCGAAHDRDVNAAKNIVAAGQVETKNGRGGHVRRMVPLGTCAVLDEASTSGPTPESSAF

SEQ ID NO: 309 - protein, 332 aa, Unknown
  Description of Unknown: aquatic-freshwater-freshwater microbial mat sequence
MNDVSSVPVQQSIRNLDVAFRRFFNGLKGKGPKVGFPTWKRKDGKQSAEFTRSGFKLQRGKLYIAKVGDVDVRWSRALPSVPKTATVTLDAAGRYHVSFTVEKTDVALNGGSPVGVDLGIKTFAALSTGELVHAPDTKRLERRIGKAQRGLSRCRKGSARRGRAKLRVAKLHAVLADTRRDFLEKFSTRLVREHSLIALEDLNVAGMAKNHCLARAVNRQGWRMFRTMVQSKCERYGREVRIVGRWEPTSQVCSGCGHRWGRVGLGVRTIACEGCGEVHDRDVNAAKNVVAAGLADTENGRGEWVSRVVSMGTGVPFVEASTAGASPGISAL

SEQ ID NO: 310 - protein, 398 aa, Unknown
  Description of Unknown: aquatic-freshwater-freshwater microbial mat sequence
MASLRYSYRLYPTTEQRRALAQTFGCVRVAWNDALARSQVSGAKYPGFAATSRLLTESKKSPERAWLNDVSSVPVQQSIRNLDVAFRRFFNGLKGKGPKVGFPTWKRKDGKQSAEFTRSGFKLQRGKLYIAKVGDVDVRWSRALPSVPKTATVTLDAAGRYHVSFTVEKTDVALNGGSPVGVDLGIKTFAALSTGELVHAPDTKRLERRIGKAQRGLSRCRKGSARRGRAKLRVAKLHAVLADTRRDFLEKFSTRLVREHSLIALEDLNVAGMAKNHCLARAVNRQGWRMFRTMVQSKCERYGREVRIVGRWEPTSQVCSGCGHRWGRVGLGVRTIACEGCGEVHDRDVNAAKNVVAAGLADTENGRGEWVSRVVSMGTGVPFVEASTAGASPGISAL

SEQ ID NO: 311 - protein, 297 aa, Unknown
  Description of Unknown: aquatic-freshwater-groundwater sequence
MKKQGNKAGFPRFKPFEKMKSLHYPQYGNGFFLDKTLEASPFGKIQIVRHREIKGRIKTLSIKREASGKWFACISADAPLIIKFSNNQPKVGIDLGLETFATLSNGEKVQNPRHIKKYEKRLAFLQRKRSRKTKGSRNRKKANEIAARQYLKLKNTRLDFLHKLSHNLVNSYSLICLEDLACQEMAENRFGKQINDAGWGRFATMIQYKAESAGAEVIFVNPENTSKTCCICGNLQDMPLNERAYNCKSCGNSLDRDINAALNILTRATAGMAGSNASGDETIIPSLKEEAHAFTRG

SEQ ID NO: 312 - protein, 382 aa, Unknown
  Description of Unknown: aquatic-freshwater-groundwater sequence
MHRAHRIRLNPTPEQEKYLWRCAGVARFTWNWALAAYNDTLVRGEKPSIAKLKVEFNRQRAEEAFAPWVGEVQSYAYQYAFQDLRTAINRYHELRKADKLKPRAGWKPRKDGRPFGWPRFKARALTTPAFGLANNGGVHCAGNLAYLQRCPSPINMAEELRFTGRILSGHVSYTGGHWHLSVSLDLPDPQPEPLPGRVGVDLGIKSLAVTSDGVVYENPKHLRASQRKLARLQRELARRTKGGKNRAKTQTKIARLHERIANQRRETLHEMTTDLVSRYGTVVVEDLNVSGMLSNHRLALAVSDASFGEIRRQLEYKAPAHGSQVLVANQWFPSSKTCNDCGCVTALTLSDRVWTCPNCGVVHDRDINAAQNLRDYQPVSVA

SEQ ID NO: 313 - protein, 374 aa, Unknown
  Description of Unknown: aquatic-freshwater-groundwater sequence
MNPTPEQEKYLWRCAGVARFTWNWALAAYNDTLVRGEKPSIAKLKVEFNRQRAEEAFAPWVGEVQSYAYQYAFQDLRTAINRYHELRKADKLKPRAGWKPRKDGRPFGWPRFKARALTTPAFGLANNGGVHCAGNLAYLQRCPSPINMAEELRFTGRILSGHVSYTGGHWHLSVSLDLPDPQPEPLPGRVGVDLGIKSLAVTSDGVVYENPKHLRASQRKLARLQRELARRTKGGKNRAKTQTKIARLHERIANQRRETLHEMTTDLVSRYGTVVVEDLNVSGMLSNHRLALAVSDASFGEIRRQLEYKAPAHGSQVLVANQWFPSSKTCNDCGCVTALTLSDRVWTCPNCGVVHDRDINAAQNLRDYQPVSVA

SEQ ID NO: 314 - protein, 382 aa, Unknown; identical to SEQ ID NO: 312
  Description of Unknown: aquatic-freshwater-groundwater sequence

SEQ ID NO: 315 - protein, 374 aa, Unknown; identical to SEQ ID NO: 313
  Description of Unknown: aquatic-freshwater-groundwater sequence

SEQ ID NO: 316 - protein, 398 aa, Unknown
  Description of Unknown: aquatic-freshwater-sediment sequence
MTAISISHKIALEPTKLQAAHFALCVGASRKAYNWALDTWNRQWDDGRKPKAADIRKLFNEVKWHDDTLRWMTGARNFVADRSIQNLGEAWKKHFRAPAQWRKPTFHSTRIHRSFYVSIGNRKAPNIQVQGRRVRLCLEGTNYPEGQARIGWVKMREELRWDGRIESATISRDEKRWYISFSCSGAENYPHRAGEGLLGVAIGFNTVALSNGTVFDQRRPLERYLVKKQRLSRSLSRKQSRLWNKKTKEVQRQSSANWEKARARLARLDDRIANLRSDFIHRVTTDIVRTGKALVIEAVNVQRLLKDGRTARAASDVSFFEWKRQLQYKTQVAGGSLQQVPTSIDLYQVCSRCGRRNYDARKYGKRFVCPHCGLDIENGVNIASNLATVKSAESQACG

SEQ ID NO: 317 - protein, 365 aa, Unknown
  Description of Unknown: aquatic-marine-aqueous sequence
MSRFTWNWALAAYNDGVPFSYLKTEFNRLRSEDGFAPFVSEVQSYAYQQAFNDLNAALSRYFKFQKEGRLKPPAGWKPRKDRKPFGWPRFKSRDKSTPSFYLANNGGMRFDGHGVVIQKCPGGPVNMAEPLRFDGKIMGGRVSYTGGYWYLAVSVQMGDPEPTADTSAAVGVDMGIKYRAVTSDGVIYNNPKSLAQNLRKLRKLQRSLSRMRDAAKAEGRKLGESNNYQKRKREIAKLHATIANIRREHAHEMTTELVREYGVVGVEDLNIRGMVKNRRLSRAVMDASMYQVRTQLDYKLKTSGGELVVVDRWYASSKTCNACGEKVDALPLSIRQWACPSCGAEHDRDGNAAKNIRDEALRMRG

SEQ ID NO: 318 - protein, 389 aa, Unknown
  Description of Unknown: aquatic-marine-aqueous sequence
MNRAHRIRLNPTTEQEEYFWQCAGVSRFTWNWALAAYNDGVPFSYLKTEFNRLRSEDGFAPFVSEVQSYAYQQAFNDLNAALSRYFKFQKEGRLKPPAGWKPRKDRKPFGWPRFKSRDKSTPSFYLANNGGMRFDGHGVVIQKCPGGPVNMAEPLRFDGKIMGGRVSYTGGYWYLAVSVQMDDPEPTADTSAAVGVDMGIKYRAVTSDGVIYNNPKSLAQNLRKLRKLQRSLSRMRDAAKAEGRKLGESNNYQKRKREIAKLHATIANIRREHAHEMTTELVREYGVVGVEDLNIRGMVKNRRLSRAVMDASMYQVRTQLDYKLKTSGGELVVVDRWYASSKTCNACGEKVDALPLSIRQWACPSCGAEHDRDGNAAKNIRDEALRMRG

SEQ ID NO: 319 - protein, 365 aa, Unknown
  Description of Unknown: aquatic-marine-aqueous sequence
MSRFTWNWALAAYNDGVPFSYLKTEFNRLRSEDGFAPFVSEVQSYAYQQAFNDLNAALSRYFKFQKEGRLKPPAGWKPRKDRKPFGWPRFKSRDKSTPSFYLANNGGMRFDGHGVVIQKCPGGPVNMAEPLRFDGKIMGGRVSYTGGYWYLAVSVQMDDPEPTADTSAAVGVDMGIKYRAVTSDGVIYNNPKSLAQNLRKLRKLQRSLSRMRDAAKAEGRKLGESNNYQKRKREIAKLHATIANIRREHAHEMTTELVREYGVVGVEDLNIRGMVKNRRLSRAVMDASMYQVRTQLDYKLKTSGGELVVVDRWYASSKTCNACGEKVDALPLSIRQWACPSCGAEHDRDGNAAKNIRDEALRMRG

SEQ ID NO: 320 - protein, 351 aa, Unknown
  Description of Unknown: aquatic-non marine saline and alkaline-hypersaline lake sediment sequence
MDETCPELLWVRDELGMNKQIQQVPCEDLEKAWKRFFDWCRARKKGNVGLRRVGPPKFKSSRWMVGMSFGAKQGVEHDPETRKVRIPSIGWIRHFEKDVDFSNDKIKCCRVVWRASGWYCSLSMDNDIEIKSPLKWKKRKTHSVHLGIRHYAVLSDGNNVDHPRNLERNLDRLSKLCREWSRKKKGSRRWRIWRDRVRRVHEKIANCRKDFIHKMTDDLLKKYPCLISEKWSISDMVENEKTKRKRRKIKAGRRKPGSRMMEKLLHRGIMDSSWYEVRRQLKYKSEWRRKPYHETHMGFKSTQTCFHCKHVNDFVTLNMKTFTCRGCGRKIERESNAAANVREMGFSELGL

SEQ ID NO: 321 - protein, 408 aa, Unknown
  Description of Unknown: aquatic-non marine saline and alkaline-hypersaline lake sediment sequence
MRRSHALKLDPNAGQARKLRLYCIAHCKIWNHFLEKCKKGLIPKKSNAMTHQLGNKRMDETCPELLWVRDELGMNKQIQQVPCEDLEKAWKRFFDWCRARKKGNVGLRRVGPPKFKSSRWMVGMSFGAKQGVEHDPETRKVRIPSIGWIRHFEKDVDFSNDKIKCCRVVWRASGWYCSLSMDNDIEIKSPLKWKKRKTHSVHLGIRHYAVLSDGNNVDHPRNLERNLDRLSKLCREWSRKKKGSRRWRIWRDRVRRVHEKIANCRKDFIHKMTDDLLKKYPCLISEKWSISDMVENEKTKRKRRKIKAGRRKPGSRMMEKLLHRGIMDSSWYEVRRQLKYKSEWRRKPYHETHMGFKSTQTCFHCKHVNDFVTLNMKTFTCRGCGRKIERESNAAANVREMGFSELGL

SEQ ID NO: 322 - protein, 408 aa, Unknown; identical to SEQ ID NO: 321
  Description of Unknown: aquatic-non marine saline and alkaline-hypersaline lake sediment sequence

SEQ ID NO: 323 - protein, 360 aa, Unknown
  Description of Unknown: aquatic-non marine saline and alkaline-hypersaline lake sediment sequence
MTHQLGNKRMDETCPELLWVRDELGMNKQIQQVPCEDLEKAWKRFFDWCRARKKGNVGLRRVGPPKFKSSRWMVGMSFGAKQGVEHDPETRKVRIPSIGWIRHFEKDVDFSNDKIKCCRVVWRASGWYCSLSMDNDIEIKSPLKWKKRKTHSVHLGIRHYAVLSDGNNVDHPRNLERNLDRLSKLCREWSRKKKGSRRWRIWRDRVRRVHEKIANCRKDFIHKMTDDLLKKYPCLISEKWSISDMVENEKTKRKRRKIKAGRRKPGSRMMEKLLHRGIMDSSWYEVRRQLKYKSEWRRKPYHETHMGFKSTQTCFHCKHVNDFVTLNMKTFTCRGCGRKIERESNAAANVREMGFSELGL

SEQ ID NO: 324 - protein, 399 aa, Unknown
  Description of Unknown: aquatic-non marine saline and alkaline-saline lake sequence
MTNRLRYSYRLYPTPEQRHALAQTFGCARVVWNDALARAQVGGAKYPGFAATSRLLTESKKSPARAWLNDVSCVPVQQSIRNLDIAFRHFFNGLKGKGPKTGFPAWKRKDGKQSAEFTRRGFKLQRGKLCLAKIGDVEVRWSRSLPSAPKTATVTLDTAGRYHVSFTVEKVDVAMEGGSPVGIDLGIKTFAALSTGELVHAPELKRLERRIDKAQRALSRCQKGSARRGRAKLRVAKLNATLADTRRDFLEKFSTRLVRQHSLIALEDLAVANMTKNHCLARAVSRQGWRMFRTMVESKCERYGREIRIVNRWEPTSQVCSGCGHRWGKLGLGVREIACEGCGEVHDRDINAAKNVVAAGLAETKNGRGEWVNRVVSMGTGVPFVEASTAGASPGVSAL

SEQ ID NO: 325 - protein, 399 aa, Unknown; identical to SEQ ID NO: 324
  Description of Unknown: aquatic-non marine saline and alkaline-saline lake sequence

SEQ ID NO: 326 - protein, 403 aa, Unknown
  Description of Unknown: aquatic-non marine saline and alkaline-saline water sequence
MPMRWRWQTYTPRVRGVRVMKMHRAHRIRLNPTPEQEQYLWRCAGVARFTWNWALAAYNDTLARGEKPSIAKLKVEFNRLRAEESFAPWVGEVQSYAYQYAFGDLRTAINRYHKLRKADKLKPRAGWKPRKDGRPFGWPRFKARALTTPAFGLANNGGVHCAGNLAYLQRCPSPINMAEELRFTGRILSGRVSYTGGHWYLSVSLDLPDPQPEPLSGRVGVDLGIKSLAVTSDGVVYENPKHLRANQRKLARLQRELSRRTKGGKNRAKTQAKIARLHEQIANRRRETLHEMTTDLVSSYGTVVVEDLNVSGMLSNHRLALAVSDAAFGEIRRQLEYKAPAHGSQVLVANQWFPSSKTCNDCGYITTLTLSDRVWTCPNCGVVHDRDINAAQNLRDYQPASAA

SEQ ID NO: 327 - protein, 384 aa, Unknown
  Description of Unknown: aquatic-non marine saline and alkaline-saline water sequence
MKMHRAHRIRLNPTPEQEQYLWRCAGVARFTWNWALAAYNDTLARGEKPSIAKLKVEFNRLRAEESFAPWVGEVQSYAYQYAFGDLRTAINRYHKLRKADKLKPRAGWKPRKDGRPFGWPRFKARALTTPAFGLANNGGVHCAGNLAYLQRCPSPINMAEELRFTGRILSGRVSYTGGHWYLSVSLDLPDPQPEPLSGRVGVDLGIKSLAVTSDGVVYENPKHLRANQRKLARLQRELSRRTKGGKNRAKTQAKIARLHEQIANRRRETLHEMTTDLVSSYGTVVVEDLNVSGMLSNHRLALAVSDAAFGEIRRQLEYKAPAHGSQVLVANQWFPSSKTCNDCGYITTLTLSDRVWTCPNCGVVHDRDINAAQNLRDYQPASAA

SEQ ID NO: 328 - protein, 303 aa, Unknown
  Description of Unknown: gut metagenome sequence
MKQAIRQMDGAYQKFFKQHNGFPKFKSKKDKQSALFPYEAISKHNTFETRHISLTTLLKNIRFRCSDLYFSRLQKYNKNIRSATLSKTKSGNFFLSILIEMEDAELKRFGHTNKQVGIDLGVKDFVITSDGEVFENKHFFRKEERQVKKLHRQLSKKVKGSNNRKKTQVRIAKLFERITNKKNAYIHYVTNELLTYFDTIFMEELNVKGMLRNHHLAKAIQEVGFYKFKETLVNKAFVNDKQVVFIDRFYPSSKTCSVCGYKKQDLRLSDREWVCPKCGTKHNRDINAAVNILLEGQRMLTAG

SEQ ID NO: 329 - protein, 303 aa, Unknown; identical to SEQ ID NO: 328
  Description of Unknown: mammals-digestive system-asian elephant fecal-elephas maximus sequence

SEQ ID NO: 330 - protein, 332 aa, Unknown; identical to SEQ ID NO: 309
  Description of Unknown: microbial mat metagenome sequence

SEQ ID NO: 331 - protein, 398 aa, Unknown; identical to SEQ ID NO: 310
  Description of Unknown: microbial mat metagenome sequence

SEQ ID NO: 332 - protein, 331 aa, Unknown
  Description of Unknown: seawater metagenome sequence
MRWWMVRLKESQEYSFLRELNSQSLVSRLRELDNTYWDCFLKRKEGAQLPVIKKRSKHNSFHLPDPKKQAQVKGNKVKLSKIGEVTFFKSRKIDGEIRTARVFYRTGYWYISFQVKQEIDIPKRKDKGRAGIYLGGKNLLTLVTNKNKKERYDLLNIYGKYEPLLKKKQKSLKRKVSFSKNWEKKQAEIKKIHRKIFNTRRDTLHKISTEVCKNHATIYLSDFRVLKTLNKGRLKKKEKEKNKKVLDQGLWYLKEFIVYKGLWRGNIVKKVNNENSILTCSSCGVINDTRQGEKFCCNDCGLKESLEINAAKNILAAGHAVTVCEANQLRN

SEQ ID NO: 333 - protein, 331 aa, Unknown; identical to SEQ ID NO: 332
  Description of Unknown: seawater metagenome sequence

SEQ ID NO: 334 - protein, 608 aa, Unknown
  Description of Unknown: terrestrial-soil-corn, switchgrass and miscanthus rhizosphere sequence
MPGDAPAGHVYLRAFQTELDPTVAERRLLGRHVAAARVSHNWALERWNSLQCPRAIVRGLRALAGLDVKGGEAANMLGVFLRALVFGTPVAVRTPKGAARRYRYKPPEPPDVDVSPNGPSIHASLVREKNNAQDLAWLGEVSAFAVREAVEDVADGWKHFFEHLKAGRFDKAGPPQFRKARDRHYHVDQPDPIRVTDRAVKIPGVGWVRLKERGYLPPTRADSHALVGGGKCVGLGISERDGRWYVSLRAHVPRPMPQKRAPGRAKRDAPVPRNPNLTLGVEVGVRSLVTLSTGAHFAGLREDERIIAATRRLHLWQRRQERRWQRGKSRREQSAGWREAVRWVGHYHAQLTDLRADLTGKAVRAIVDTGAAVIVMREPATAKMLARRHASEPRTRNALAPAVHAARMGDVLRRVGYKQKWAGGQLVEVPVAEPVTRRCNKCGAVRDTEPAYPDFHCTACGHREERDDNAAANLKDYPGRNPGADPGRSGPDSPSAHTEGVTAGGTAGTASGESPGHGSGRKARERASLGPGNRPRAGARLTAQADQPLTSPRYDGALREHRGDAPEQSQGNHTPAAPVPADDGDRSQTVSQPRERTAELRGVSGAQP

SEQ ID NO: 335 - protein, 617 aa, Unknown
  Description of Unknown: terrestrial-soil-corn, switchgrass and miscanthus rhizosphere sequence
MKLKDGGNIMPGDAPAGHVYLRAFQTELDPTVAERRLLGRHVAAARVSHNWALERWNSLQCPRAIVRGLRALAGLDVKGGEAANMLGVFLRALVFGTPVAVRTPKGAARRYRYKPPEPPDVDVSPNGPSIHASLVREKNNAQDLAWLGEVSAFAVREAVEDVADGWKHFFEHLKAGRFDKAGPPQFRKARDRHYHVDQPDPIRVTDRAVKIPGVGWVRLKERGYLPPTRADSHALVGGGKCVGLGISERDGRWYVSLRAHVPRPMPQKRAPGRAKRDAPVPRNPNLTLGVEVGVRSLVTLSTGAHFAGLREDERIIAATRRLHLWQRRQERRWQRGKSRREQSAGWREAVRWVGHYHAQLTDLRADLTGKAVRAIVDTGAAVIVMREPATAKMLARRHASEPRTRNALAPAVHAARMGDVLRRVGYKQKWAGGQLVEVPVAEPVTRRCNKCGAVRDTEPAYPDFHCTACGHREERDDNAAANLKDYPGRNPGADPGRSGPDSPSAHTEGVTAGGTAGTASGESPGHGSGRKARERASLGPGNRPRAGARLTAQADQPLTSPRYDGALREHRGDAPEQSQGNHTPAAPVPADDGDRSQTVSQPRERTAELRGVSGAQP

SEQ ID NO: 336 - protein, 602 aa, Unknown
  Description of Unknown: terrestrial-soil-terrestrial soil sequence
MTTILRAYKTELDPTDEQRVVLARHVAGARVAHNWALEKWKELDGTRGVALGCRALAGIDAKGGEAAALFGYCLAALIRGEPVKVRTPKSEAGSRYRYRPASGVQLPDFRAGRVDWYSQLVSAKEEQPERFGWLSELSAFAIREAVLDVADGWKHFFEHLKAGRYASAGPPRFRGRQRASYHSDQPDPIRVTERAVKIPGVGWVRMKERGYLPVTEENSHRFIGGGKACGLGVSEKDGRWYVALRCEVPRPFPQKRGPGRALAMHQTKRVPGRELGVEVGVRVLAVASTGERAGHVWHSPLRDDRRIDKFEMLRKRWERRMARRWKDGVKTRDQSQGWKEAAMRVAHYHARIKSLRDDVCGKAARQIADMGAETVRMRGPGIAKMLSRAGKRGDAARTRNRLAKNVHAARMGDLRRRLEYKQAWAGGRLELVPIEEPTTNRCSACNAVRDTNAGYPTFMCPTCGYQEDRDDNSAINLLNYRAPSGDPAAGPRSAGLKPPKGDNGRRKRTARAEEKSSVTAPHGDVTSAPGPGNRVSGASHSVRPIDAYHEVPFEQSGDAHLGSRQFGLDTALFGADDPNRSQIEPQRSEFPGLLAHRAGGTS

SEQ ID NO: 337 - protein, 341 aa, Unknown
  Description of Unknown: terrestrial-soil-vadose zone soil sequence
MKQLCAMQEALRDLETAYRNFFRRVALGKQGLWRGKLGFPKMKKKSKAIGSFRLTGSIKVFSGTVQLPRLGCLRLHEHDFIPTDAKVLSATVSEQAGRWFVSIQVEEEQEKPPPTATTAIGVDLGIKTLATCSDGKIFANPRALSHAHKMLRRLERQKSRRKKGGKNRKKICRKLAKQHARVANIRKDAAHKLSSYLCKNHALVAIEDLHVAGMLKNHKLAQAVSDSNFGEIRRQLEYKAFWQGVHLVIIDRWYASSKTCSGCGWVDENQDLSDRTFICQECGLVMDRDENAAINILNEALRTTGSYSGSHAYGESSSGLVSGSGETALVEIGTNLHVGMS

SEQ ID NO: 338 - protein, 573 aa, Unknown
  Description of Unknown: terrestrial-soil-vadose zone soil sequence
MKRAAPLESGMIRRAYRVRLEPTAEQRRELARCVGVARAAFNWALAEWRRQYRAYKLAEKAPARALRLLARWQSPLAEDPRWQGGDNPKPNGFAIHKRLTAIKREQFPWMTDVPALVVREAVGDVGAAYEHFFRRLKEGAVGREAGEPRFRSRHRRKSFHMDQGDAIKIARFVRADETTGRHADAIVLPVLGSVHVHKRQNGFLPAGAKLCGVGISEHLGLWYAAVRAEVPAPAPRRKRMAEKRLGVEVGVRSLAVTSDGKRIGALRDLDKTKSGERRLALWLRRMSRRFRQGAKKQSAGWVEAKHHVQRLHSEIAETRDELLHYASRRVVDSGAAVVVMREPNVRGMIGKAGKTGEAARARNVIAPMVSKVGWYELRRKVEYKQQWAGGAFVEAPAEIESTKTCSVCGSVRDTDPGYPLFRCPSCGHQEDREANSSKVLRDYRPPSGGPVGGDRADRRKTARKRGTMAERTGKPGGEQSAPTGPDGVATSPHGSGNGAASQEAETGAVIRDPTRPPGEPGARLRVPSATASDGGHEPIDSQESCVFASPPDGPDGDRSQTASQASETSGGSA

SEQ ID NO: 339 - protein, 573 aa, Unknown
  Description of Unknown: terrestrial-soil-vadose zone soil sequence
MKRAAPLESGMIRRAYRVRLEPTAEQRRELARCVGVARAAFNWALAEWRRQYRAYKLAEKAPARALRLLARWQSPLAEDPRWQGGDNPKPNGFAIHKRLTAIKREQFPWMTDVPALVVREAVGDVGAAYEHFFRRLKEGAVGREAGEPRFRSRHRRKSFHMDQGDAIKIARFVRADETTGRHADAIVLPVLGSVHVHKRQNGFLPAGAKLCGVGISEHLGLWYAAVRAEVPAPAPRRKRMAEKRLGVEVGVRSLAVTSDGKRIGALRDLDKTKSGERRLALWLRRMSRRFRQGAKKQSAGWVEAKHHVQRLHSEIAETRDELLHYASRRVVDSGAAVVVMREPNVRGMIGKAGKTGEAARARNVIAPMVSKVGWYELRRKVEYKQQWAGGAFVEAPAEIESTKTCSVCGSVRDTDPGYPLFRCPSCGHQEDREANSSKVLRDYRPPSGGPVGGDRADRRKTARKRGTMAERTGKPGGEQSAPAGPDGVATSPHGSGNGAASQEAETGAVIRDPTRPPGEPGARLRVPSATASDGGHEPIDSQESCVFASPPDGPDGDRSQTASQASETSGGSA

SEQ ID NO: 340 - protein, 387 aa, Unknown
  Description of Unknown: wastewater metagenome sequence
MLKAHVIRLNPTEEQASYFWRCAGIARFTWNWALAELNAAYDRGERPAIGSLKLAFNRLRKEEGFAPFVGEVQSYAYQQAFTDLQKALSRYHDFRKRGLLKPPAGWKGRKDHKPFGWPRFKARNRSTPAFYLANNGGLRLQGHQVTIQRCPGGPVNMAEQLRFAGRVMGGRVRYRAGHWYLTVQVDVPVEPVPAHTGPAVGLDVGIKALAVTSDGEIYDNPKALGRHQRKLRLLQRSLARQTRGGSNYRKTQAKIARLHERIANIRKHTLHQISHEITRDYGLIGLEDLNVAGMLENGKLARSISDVAFGELRRQIGYKSEWRGSRVVIVSRWFPSSKTCNECGHVMADMPLSVRWWQCPTCGAEHDRDGNAAVNIRNEAVKMAGAA

SEQ ID NO: 341 - protein, 387 aa, Unknown
  Description of Unknown: wastewater metagenome sequence
MLKAHVIRLNPTEEQASYFWRCAGIARFTWNWALAELNAAYDRGERPAIGSLKLAFNRLRKEEGFAPFVGEVQSYAYQQAFTDLQKALSRYHDFRKRGLLKPPAGWKGRKDHKPFGWPRFKARNRSTPAFYLANNGGLRLQGHQVTIQRCPGGPVNMAEQLRFAGRVMGGRVRYRAGHWYLTVQVDVPVEPVPAHTGPAVGLDVGIKTLAVTSDGEIYDNPKALGRHQRKLRLLQRSLARQTRGGSNYRKTQAKIARLHERIANIRKHTLHQISHEITRDYGLIGLEDLNVAGMLKNGKLARSISDVAFGELRRQIGYKSEWRGSRVVIVSRWFPSSKTCNECGHVMADMPLSVRWWQCPTCGAEHDRDGNAAVNIRNEAVKMAGAA

SEQ ID NO: 342 - DNA, 29 bp, Artificial Sequence
  Description of Artificial Sequence: Synthetic oligonucleotide
gttcaccccacgggtgcgtggagtgatgg

SEQ ID NO: 343 - DNA, 27 bp, Artificial Sequence
  Description of Artificial Sequence: Synthetic oligonucleotide
gttcgccgcgcatacgcggcttaaaag

SEQ ID NO: 344 - DNA, 29 bp, Artificial Sequence
  Description of Artificial Sequence: Synthetic oligonucleotide
ggttaccccgcgcgggtgtggagtgaggg

SEQ ID NO: 345 - DNA, 37 bp, Artificial Sequence
  Description of Artificial Sequence: Synthetic oligonucleotide
cttgcgggatcggtttgaatggataggaaagtgacat

SEQ ID NO: 346 - DNA, 20 bp, Artificial Sequence
  Description of Artificial Sequence: Synthetic oligonucleotide
cagcgcacgaggaggtgctg

SEQ ID NO: 347 - DNA, 65 bp, Artificial Sequence
  Description of Artificial Sequence: Synthetic oligonucleotide
ctgccatggtggcgtggtcgggaagtccccatggcatgggctctgtctcattcggcgaaccgccc

SEQ ID NO: 348 - DNA, 27 bp, Artificial Sequence
  Description of Artificial Sequence: Synthetic oligonucleotide
ggcacagtggttggcttcttcttccca

SEQ ID NO: 349 - DNA, 29 bp, Artificial Sequence
  Description of Artificial Sequence: Synthetic oligonucleotide
gtacaccccacgggtgcgtggagtgaggg

SEQ ID NO: 350 - DNA, 29 bp, Artificial Sequence
  Description of Artificial Sequence: Synthetic oligonucleotide
gtcgggcccacgcgtacgtgggcgattgg

SEQ ID NO: 351 - DNA, 29 bp, Artificial Sequence
  Description of Artificial Sequence: Synthetic oligonucleotide
atacgccccacgtgcgtgtggggtgaggg

SEQ ID NO: 352 - DNA, 37 bp, Artificial Sequence
  Description of Artificial Sequence: Synthetic oligonucleotide
cgtgtgaatgcgtgaaattgagtagaggatatgtcag

SEQ ID NO: 353 - DNA, 36 bp, Artificial Sequence
  Description of Artificial Sequence: Synthetic oligonucleotide
gtgtgaatgcgtgaaattgagtagaggatatgtcag

SEQ ID NO: 354 - DNA, 26 bp, Artificial Sequence
  Description of Artificial Sequence: Synthetic oligonucleotide
cgcaagccgaaggcttacggatgcgg

SEQ ID NO: 355 - DNA, 29 bp, Artificial Sequence
  Description of Artificial Sequence: Synthetic oligonucleotide
ctgcgcaagccgaaggcttacggatgcgg

SEQ ID NO: 356 - DNA, 23 bp, Artificial Sequence
  Description of Artificial Sequence: Synthetic oligonucleotide
tcttcatcaaccttcacatctac

SEQ ID NO: 357 - DNA, 35 bp, Artificial Sequence
  Description of Artificial Sequence: Synthetic oligonucleotide
aatattacacataaaactacatacataattacata

SEQ ID NO: 358 - DNA, 23 bp, Artificial Sequence
  Description of Artificial Sequence: Synthetic oligonucleotide
ccgtgacggggcgtcgtggtcag

SEQ ID NO: 359 - DNA, 23 bp, Artificial Sequence
  Description of Artificial Sequence: Synthetic oligonucleotide
tcgtgacgggcggcgcttgtcag

SEQ ID NO: 360 - DNA, 34 bp, Artificial Sequence
  Description of Artificial Sequence: Synthetic oligonucleotide
ttgatcagatcatcgagttgagtgagcacgaggt

SEQ ID NO: 361 - DNA, 36 bp, Artificial Sequence
  Description of Artificial Sequence: Synthetic oligonucleotide
cttgcaatgcgcgaaggaaagcgtcgacgtggtcac

SEQ ID NO: 362 - DNA, 29 bp, Artificial Sequence
  Description of Artificial Sequence: Synthetic oligonucleotide
gttcaccccacaggcgcgtggagtgatgg

SEQ ID NO: 363 - DNA, 805 bp, Unknown
  Description of Unknown: aquatic-freshwater-sediment sequence
gttagcacacaagcgatagcacatgaccgcgccgaggagagcgcaagctctgccaaaccctcggcgcggtttttgtgcgcctatgcagcccgccctaataacgtatattatcggacgttatccaggggcggttcgggtcagaagcggtcagaaaaatgacggcaatttcgatttcgcacaagattgcgcttgagcctacgaaattgcaggctgcccacttcgcgctgtgcgtcggtgcctcgcgaaaggcatacaattgggcgctggatacgtggaatcgccagtgggacgatggcagaaagccgtgttcgcggtgcggccgccgcaactatgatgcgcggaagtatggcaagcgatttgtatgcccgcattgcgggctggacatcgagaacggcgtgaacattgcgtcgaatctcgctaccgtcaaatcggcggaaagtcaagcctgtggataggccggcgtcaaccccacgctgcccgtgaacgtggcgctacaatggccgagaagcaggaacccgtgtacgcgtggtctttgatattttgtgtgggcttggactgggcaccacaagatgtggtcttcaagcggctcgttcggtgcgggcggcatttaacaatctgacaacccgcagtctgtagccgcccgcgccggatgttgaggagtaaacaatggacactctaagcgtgatcgtaaattgtgtagcgcttgcggtcgtggccggtgctctcgtttacctcggatgggcgctctaccaagcgtataggaggcgaatatgatgttcttaactgatctgcttcacgatgcgga

SEQ ID NO: 364 - DNA, 1542 bp, Unknown
  Description of Unknown: seawater metagenome sequence
aaaactacatacgatattacatataatttataacataatattacacacaaactacatacataattacatacaatttacaacatagtattacatacaaaactacacatgatattacatatttttataaacctataaaacaaaattccttcttataaacaagattaccctagttgatgatattatacacaacaccacattatgtcatagaaatatatatctttcatttttctgtaaaaaaacactaggtttgtatagttttttgcaaaaaaacgttccccccctaaaataatttttttcttctaaaagaatttttttgcctttacaagttaccactgttaatgcatgatgaacttaaacttaaaaaatggtgaaatatattttgtaaaaaaccttcaaaaagacaaaaaaaaagagctagactcttgcttcaaagacaaaaccaagaaacaaaaatctaatctctctaacatcaagattatgatactatatttcaacagaactattttagttatgggtagtgattttaaggtgtcttatgtgaaagcgaccttttggagagagcttgaagagcttaagaaatcctttttttctacaagagacttttctgtagaaaagagagaagcacaccaacaagggagttaagtgtgcttctaataatgaaaatctactaacagattcgcgttccattttactctaaaaagataattttaacaaataggaaaaaatatttctttaattgagaaaatttacatttctggttacaatgatcattgcaaaagggatgcgaaaataggtttttaagtgataatccacaaaacatatcagtttagattaaagccaacaaaagaacaggaggctttgttttggcggttttccggtcattgcaggtttatctggaattacttttggaaaataaataaaatcagactcgataacaaacaaaaaataatgaagttctacgaaatgcgctggtggatggttcgtctgaaagagtcgcaggaatatagctttttaagagaattaaattctcagtctttagtttctcgtttgagggagttggataatacgtattgggattgttttttaaagagaaaagaaggagttcaacttccttgtggcgttattaatgataccagacaaggagaaaaattttgttgcaatgattgcggtttaaaagagtcgctagagataaatgcagcaaaaaatatattggcggcagggcatgccgtgacggtctgtgaagcgaatcaattaagaaattaagagatcggcagcagaaacctgtagagatatgtgaatatatctaccttagaaataggaatctcataccgtaaagggaagagaggatgccaacctgcgtattttaatctatatttggagaacttgctctaaatgaaaaaggaagttagcataggaaatgtaaatagtattaagacaggaaaaatatcaatgaataaatctttaagaaatctaattgtcattctttctttttttgctttatctggctgccagaataaagatataaacactacaggtaattct

SEQ ID NO: 365 - DNA, 1575 bp, Unknown
  Description of Unknown: aquatic-freshwater-groundwater sequence
gccgatgaaacgctcaaggcttgtattgcctggccgctgttgaccctggctgatctggagacgttgctttcggtaataaacgaggcgtgcgaaacccgattcaccatcatctccgagatgcagaaacgcaatcggcgcgcccgcatttgatcgaaagtgtaggaagttgcgaataactattgacattttagcagaggtgtgctagaatacatttgcttggaactgacaagccaagtagttataaatggactctccgctaagactcctgctccgaaagttggggccgacttgccttagcgcctgtcaagcgcaaatgcggagagtcggcggtcggaaccaacttttagcgcaggagtttctttgtctacaaatatcgccgaaatactcatgcggagatgtaaaacgcctggggatggtcgaggttcaactaaaccagatgaaccaggaatccatacactcgttaggagcgagagaaatgcatagagcacatcgaatccgattgaatccaacgccggaacaggaaaaatatctctggcgttgcgctggcgtagcccgcttcacctggaattgggcgctggcagcttacaatgacactctggtccgcggcgagaagccatcaattgccaagctcaaagtcaaattcaatcgcagtagcaaaacgtgcaacgactgcggttgcgtcactgcgctaacgttgtctgaccgcgtatggacatgcccgaattgtggcgttgtccatgatcgagatatcaatgctgcgcaaaacctgcgtgattatcagcccgttagcgtagcttgatggaatacaatatgtcgccggagtactcacctggagacgctaaacgcctagggatggtagtggtagtagtcacgccaaacgaactaggaatctacgtgctccgtaagcgcgtggagtgagggaaacgggtgcgtctacaccgaacggtgaacgcttcccgccagacacagaaaacacctggcgctccggcttgacagcctgagcgttccgtcggtttgccgaaaggcagtgagcttcgcacgagtgccgccaacgcggccaccctgtaaattcaaccacctggaagggtctgaatgcgagtgcccatcccgccaaggggtgggtctgccctgttctcgccaaccttatcgtgtaattccaatcctcttgccagcctatggcctctgcacatcctccaattgctgaagaatgtaactggtcgtgtttccctgtaaattggtttccaaatccacgatattgtctattgacaaacggtaaaaccgtgatataatgggtttaggatgaaacgaaagcaacgggcacatgaagggaatcgcaaatggaacacagcgaaactagagaagagctgatccaaggcattaccatgaatactcaggcttggctggcagtgttctgaaccggcagggttgcgcaacaagacccgctatcgcaagccgactgcaccttacgcagaatcactacaactcgcgcggactttcaaccaacacaggaggataaccgccatggaacccaaaatcagccagtgcgaatgcgccaactgtggccggtgctggaaa

SEQ ID NO: 366 - DNA, 1457 bp, Unknown
  Description of Unknown: aquatic-freshwater-freshwater lake sequence
tatgtaataactgagagacagcttaggataattgaggatgagctatttaatataaaagatttggtttctagtttagaggatagtgatataaaatttagtatagaaaaaagtgtagataggctgatagaaagtatgtttgatggaggatgatctgcgagggctctggtgctgttccaaatcttaggaacctctcgcggtaggcggtgactggatcttagccagatatgtttaaaatttgagcttagctgctataattaagaacgtacccctcgcaaggggagcctcagagacagtcagtatctaggctttacagaaagcccaccttccagcagcggccccggcgtggcgcaacgagactacattccattttgattattaaataaactataataaaatgatatggaggaatcaacaaaggaatgaataataattttgtagtaatagattttgaaacaggaggtttagatgctagtctacacgatccagtgcagatagcagctattattttagacgggaaaacactaaaagaacgtggaaggtttgtttctatgataaaagccagtagagacgtttatgatacagagaataatataatttcccataatatagtacctacaagtcttttaactaatatagtaacaatgtctactaagagaaacagagaaaaatacgaggtacttttaaaggaagaaaatatttctagggataggattgactagaaatagtttttaattaaatgccctcctttagtggagggcattttttcttagtgaaagtacttagcagtttaccaaaaaaatctataaaaacttttaaaatatatataaattttcatcaacaatgtgtctataataaattaaatgagagtaaataaagttttccgttacgaattaaaacctaacgaagtacaaaaacaaattatggcgcagcatgccggatcggctcgttatgcttataattgggctctggaaaaaataaacagtaaagtttttaatactacaaatgataaagatctttctttaaaagaaagatcttggatctgtaaatcttgtaatacagatcatgatcgggatctgaatgctgcaattaacttaaagaaaattggagtactctctcattcgagaggaatttacgcctgcggagacagctatgctggatgatcgtcttgcgttaataccgcaagacctaaaaaggtatctgtcgttgactgaacagcgaagttgtgaagacttgaatcaggaattagaaagagatctgttaaatgtttagatttttacagattttcaggaacggctttaaatttatatatgaataagaaaaaatttaatgatgattttgatgaaatggtatataacttatcaaaaatatttaaaatgaaagattctgttattcctttttcaaaaatacaatccaggctttatcagttactaagagaagaccgttataatattttgact

SEQ ID NO: 367 - DNA, 891 bp, Unknown
  Description of Unknown: aquatic-marine-aqueous sequence
ctctgcttcttcctccatgcgttcccgaatgtcgtgttcgtcccattccggcgaaccaacaaatgcgtctaggagcgccgccaacgtgtggccgggctgccaagaatcaatctcggcttctgtcgggaaatctgcggggcgtgtgttcatgttctgcctgcctctctccgcctgccagcgggattgttggtgaaatggacggtgacatgtctcaagccgtccggtactcggtgcgcctgccgtgcacttcgtactgaggtcaagtatactgcaaaattctgcacttgtcaagcattaatttgcgtgagtttcttgacagtctgcacaagtttgcagtataatggactcatgaacagagcacaccgtattagactaaatccaacaacggagcaagaagaatacttttggcagtgtgcgggggtgtctcggtttacgtggaactgggcattagcagcgtataacgatggcgttccgtttagctacttaaaaacagagttcaatcgtttgcgcagtgaagacgggtttgccccgtttgtatcagaggttcaaagctacgcatatcagcaggcgtcaaagacttgtaacgcttgcggggaaaaggtagatgcattgccgttgtcgattcgccagtgggcttgcccgagctgcggcgcagaacacgaccgagacgggaatgctgccaagaacattagagacgaagccttgcgaatgcgaggatgattgtctagcctgcgggagtactcacatcgtgggcttaaaaatggcctggggaggatagcacgtaggtgcgccgatgaaccaggaacctacacgcacattacaaacgataaacgcacgtggaacaaacatgcatcggggagttcatccgcagcgggcacattgacgactgca

SEQ ID NO: 368 - DNA, 974 bp, Unknown
  Description of Unknown: aquatic-marine-aqueous sequence
agtaagccttgtacgctgccgtgcccggcacgaagtactgttccggcacgaagtgaatgccgttggcgcaatcctctgcgcccatgcgccggtactctgcttcttcctccatgcgttcccgaatgtcgtgttcgtcccattccggcgaaccaacaaatgcgtctaggagcgccgccaacgtgtggccgggctgccaagaatcaatctcggcttctgtcgggaaatctgcggggcgtgtgttcatgttctgcctgcctctctccgcctgccagcgggattgttggtgaaatggacggtgacatgtctcaagccgtccggtactcggtgcgcctgccgtgcacttcgtactgaggtcaagtatactgcaaaattctgcacttgtcaagcattaatttgcgtgagtttcttgacagtctgcacaagtttgcagtataatggactcatgaacagagcacaccgtattagactaaatccaacaacggagcaagaagaatacttttggcagtgtgcgggggtgtctcggtttacgtggaactgggcattagcagcgtataacgatggcgttccgtttagctacttaaaaacagagttcaatcgtttgcgcagtgaagacgggtttgccccgtttgtatcagaggttcaaagctacgcatatcagcaggcgtcaaagacttgtaacgcttgcggggaaaaggtagatgcattgccgttgtcgattcgccagtgggcttgcccgagctgcggcgcagaacacgaccgagacgggaatgctgccaagaacattagagacgaagccttgcgaatgcgaggatgattgtctagcctgcgggagtactcacatcgtgggcttaaaaatggcctggggaggatagcacgtaggtgcgccgatgaaccaggaacctacacgcacattacaaacgataaacgcacgtggaacaaacatgcatcggggagtaaatcggcttgtcgtcttt

SEQ ID NO: 369 - DNA, 988 bp, Unknown
  Description of Unknown: terrestrial-soil-vadose zone soil sequence
accacgaggttaagcctgcatatgtcagagcgctgcgagaggccgggctgatggatctctctgttgaccaggtgatcgaattgagcgagcatgagatcaaaccttcctatctcgccaaattgcgcgaggctggattgaccgatcttacttttgaccaggtcatcgaattgaacgatcacgaggttaagcctgcgtatatcaaggcgctacgcgaggccgggctcgttgacctgaccttcgaccaagtgattgaattgagcgaacgagaggttgatcccgcttatgtcagggcactgcacggcgagattcattgattttctcgtgaggcagatcacccggcgatacaggatctgcacaagatcctgacgctattggggtgacctgtctttttttatcaaaccgcgccataaaacccctcgcttcagcgaaggggatacaaggcgcgttcctcttggggcgccttgggcacggggctcgtgccatttccgacttgctctcttagaaacagaatggtagcatatgagcaggagctactgcgaggagcagactgtgacgaagcgagcatacaagttcaggtgttatccgacagatgagcaaaagcagattcttgctcgcacgttcggctgctgtcgctgggtctacaattgggcgttgcgtctgaaaaccgatgcgatcaacattctgaatgaagcattgagaactaccgggagttactcgggaagtcacgcctatggagagagcagctctggcctggtcagtggatcaggtgaaactgctctcgtcgaaataggaaccaacctgcatgtaggcatgtcctagatgtctaagtattggagaacggatttttatgagcaaaggtgagcaaacgaaagagagaatcctcggacgagccgcgcagcttttcaaccagcagggatacttcggctcgtcactctccgatatcatgcacgaaacgggtttggagaagggcggtatctataatcatttt

SEQ ID NO: 370 - DNA, 590 bp, Unknown
  Description of Unknown: wastewater metagenome sequence
tgggcaggtcgccagacgatggcgacgcggtggtgatggcgttctgggaagaaccgcctgagccgaccggcggcgtggggtttgtgctgtaatgttaaaagcgcatgtgatccgtctcaacccaaccgaagaacaggccagctacttctggcgctgcgcggggattgctcgcttcacctggaattgggcgctggctgagttgaacgccgcctatgaccggggtgaacggcctgcgattggaacctgcaatgagtgcggccacgtcatggccgacatgccgctatcggtgcgctggtggcagtgcccgacctgcggcgcagaacatgatcgggacggcaacgcagcggtcaacatccgcaacgaggccgtgaagatggcaggcgctgcctagtgcgcccgtcgcggtagtaatcacgtcgagacgcaaaacgcctggggacggtgtaggtagcaaaccggatgaaccagaaattcacgcaattgaataggtgaacaagcataacacctggaaggagtgtctcagcgacacaactaaggactgacctatgacgatcctcatcaccatgcgcgagccgaaccgggaggacgcc

SEQ ID NO: 371 - DNA, 697 bp, Unknown
  Description of Unknown: aquatic-freshwater-aquifer sequence
tcgctcggcaagagccaactccagaacgcgcacgatctgccagtttagcgggcgacgttcctcttgcgcccaccttttcagcgcggcgtgaagctcgggcggcaagcgcaacaagatgttgatggtcttgggtttctctttctttgccatatcaccagtatatcacagtgatgcaagatggtatcaacccaggagtctttgatgctgaagttccatcccgttgccgaaatgaaaatccgtgaggacacatgaatcgtgctcatcgcatccggctcaacccgacagccgagcaggcggcctacttttggcgctgtgccggagtcgcgcgcttcacctggaactgggccctgggcgaatataatgccgccctcgcccgcggcgaaaagccaagcctcacccccagtagtaaaacgtgcaacgactgcggtcagatcgtcgagttgaccctggccgagcgcacctggacttgcccccgctgcggggtgattcatgatcgagatctgaatgccgcccggaatctgcgagactacagtgcagtgaccggttaggaatgcgccgccggagtactcacacggaggcgttaaacgcctgtggatggtggtcgtagtagaggcgccagatgaagcaggagttcacacatacgtggatagaatacgcgttagggaacgcacggcgtacctggcaaacggggcctcgg

SEQ ID NO: 372 - DNA, 881 bp, Unknown
  Description of Unknown: aquatic-non marine saline and alkaline-hypersaline lake sediment sequence
agaaggtcgcacgcactgaaacttgatccgaatgccgggcaggcgcggaaactgcggctgtactgcatcgcgcattgcaagatatggaatcattttcttgaaaagtgcaaaaagggcttgattccgaaaaaaagtaacgcgatgacgcatcagctcggaaataaaaggatggataagacctgtccggaactgctgtgggtccgggatgagctgggaatgaacaagcagattcagcaggttccatgcgaagatctggagaaggcatggaagcgattcttcgactggtgcagggcgagaaagaaggggaatgtcggtctgcagacctgctttcactgcaagcacgtgaacgatttcgtgacgctgaatatgaaaacgttcacctgtcgcggatgcggacgaaagatcgagcgggaatcgaatgctgccgccaatgtcagggagatgggattcagtgagcttggtctttaacagtattgaatgtcgccgtcgggcagacggagactctaaacgctcgctgagcggacggccgctgtcgtggaaggatgtgctctttcgcgttcatgctgactgcgttgaagcgagaatttctctacgattcgagaggtgcggtgacctcagggttgccgtaccctctcgaatttttaaactgatttcctgcaatgatttagggaaatctcatgttcgacgcagcgcattatgtgcgtatatttatggatcgctcgaaaagcgatatacaagtaactgtcagcaacatgcttatgcatggaacggtgtgaatgcgtgaaattgagtagaggatatgtcagtaagggtcgaccgtcgggcatgccggaggtggcgtgtgtgaatgcgtgaaattgagtagaggatatgtcagactt

SEQ ID NO: 373 - DNA, 1172 bp, Unknown
  Description of Unknown: wastewater metagenome sequence
catcgccagcttaccgggcgctgcccagtgtgcggcgagccggcttttggacccggtgtcacgtgcaaacggctgacttgcatatcagattgggtaggcaccaacaaggagcacatcaaggagcacatcaatgacgaaccgactgattgacgcaagaatctgaagctgtttccaaatttgacaacgtaggtatttgtaggtaaaataaatacaccatgaacgcaacagtcaaaccactgagcatccgtgtccctcctgatatgcgagaaaagatcaatcgcctggcccaaagcgagcgccgttcccaacactcgatgatgttgattctgcttgaagacgcgcttctaaagcggagcgtagtagaacaagcaccatcgagtgaagcgaccgcatctcttgttctgccaacgtttcgatctgctggcgcatctcaacaggcagacgcacgctaaacgggccgtactcttgtttggttcgtggtttcgccatgtagttattctaccaccaaaacaggtacacggtcaacatgctaaaagctcacgtgattcgcctcaacccaaccaaagaacaggaaacgtatttctggcgctgcgcgggggttgcccgcttcacttggaattgggcgctggccgagttaaacgcagcttacgagaaaggcgagcggcctgccgttggaacatgcaacgactgcggctacgtgatggctgacatgctgctctcggtgcgctggtggcagtgcccggcctgcggtgcagaacatgatcgggacggcaacgcggcggtcaacatccgcaacgaagccgtaaagatggcaggcgctgcctagtgcgcccgtcgcggtagtaatcacgtcgagacgcaaaacgcctggggacggtgtaggtagcgaaccggatgaaccaggaatctacgcacactaacaggtgaacagcacaatacccggaaggaagataaagataaagcggccgcgccgccaatttaccccacggtagcgtggaattataggatttttagctatggctatggactggtttcgctcctggcacaacgcaccaacagacccaaaatggctgctgattgcacgcaaggccaacgtgccacccggcatggtgtcagccgttttctgggcgctactcgactatgcaagccaagagaaggaacgtggcagcata

SEQ ID NO: 374 - DNA, 791 bp, Unknown
  Description of Unknown: aquatic-freshwater-freshwater metagenome sequence
tcgctcggcaagagccaactccagaacgcgcacgatctgccagtttagcgggcgacgttcctcttgcgcccaccttttcagcgcggcgtgaagctcgggcggcaagcgcaacaagatgttgatggtcttgggcctctctttctttgccatatcaccagtatatcacagtgatgcaagatggtactaacccaggagtctttgatgctgaagttccatcccgttgccgaaatgaaaatccgtgaggacacatgaatcgtgctcatcgcatccggctcaacccgacagccgagcaggcggcctacttttggcgctgtgccggagtcgcgcgcttcacctggaactgggccctgggcgaatataatgccgccctcgcccgcggcgaaaagccaagcctcacccccagtagtaaaacgtgcaacgactgcggtcagatcgtcgagttgaccctggccgagcgcacctggacttgcccccgctgcggggtgattcatgatcgggacctgaatgccgcccggaatctgcgagactacagtgcagtgaccggttaggaatgcgccgccggagtactcacacggaggcgttaaacgcctgtggatggtggtcgtagtagaggcgccagatgaagcagaaattcagaccagatgtgtgatccatcaacaagccatgtcgagagcctgctgaccacctttgagcgccttgtgcgcgctcagtgggcgactaccggccgcggctcggagcatactatccgggcctacctgaccgatactcgccaacacctggcctggctggaa

SEQ ID NO: 375 - DNA, 483 bp, Unknown
  Description of Unknown: aquatic-non marine saline and alkaline-hypersaline lake sediment sequence
cagacctgctttcactgcaagcacgtgaacgatttcgtgacgctgaatatgaaaacgttcacctgtcgcggatgcggacgaaagatcgagcgggaatcgaatgctgccgccaatgtcagggagatgggattcagtgagcttggtctttaacagtattgaatgtcgccgtcgggcagacggagactctaaacgctcgctgagcggacggccgctgtcgtggaaggatgtgctctttcgcgttcatgctgactgcgttgaagcgagaatttctctacgattcgagaggtgcggtgacctcagggttgccgtaccctctcgaatttttaaactgatttcctgcaatgatttagggaaatctcatgttcgacgcagcgcattatgtgcgtatatttatggatcgctcgaaaagcgatatacaagtaactgtcagcaacatgcttatgcatggaacgggtgtccagccgttcagccagacgacgacgc

SEQ ID NO: 376 - DNA, 1303 bp, Unknown
  Description of Unknown: aquatic-freshwater-freshwater microbial mat sequence
catctccgatgcgacgcgttgcatcgcttgctccaacgtcaccaggctctgtgccgtcaggatctttcggcgaaacttcgttacgaagaccaagtgcactaggagcttggtcacgctgtgacgaccgcgatcgagcgcttgcatggccatgttttgcagagtatggtcagttgcagaccaatggcaaccgttcgctaccgatatcgactttaccctacgcctgcgcagcgcgtggcgttggcgaggacgttcggtgcggtgcggttcgtgtggaatcaagagcttgcgcgatcgcagatccatgatgctaaataccagggcttcagtgctaatgctgcgaagaacattgtcgcggccgggcaggtcgagacgaaaaacggacgtggagggcatgtgagacggatggtgcctttgggtatctgcgcagtgctcgatgaagcgtcaacctcggggccgaccccggaatcctcagccttctaggccgaggaggatgtcaaggcataggtaaaccctaacatcggggcccctaacatcggggccgtacgagaagatctgttcgtacccgaatgcccttgcggcatcgatcacgactgtagagattctcttgcgcagggcggtcaaccctttcagggacgatgtcggagatgtttttttcagtcgcacgtgtcgttacctctcgggtggcaaccagatctttcctggttcagcatcaggcatccgccttcgccgcgcgcttggtggcggtgggaaacgcaatggggaacagcgcggcgcactggcgcgcgtacttgcgggtgatgatccactggctcgcgctggtcggcatcggggtttcgctcgggccggctcctcgccaggctctcacacgtacgacgccccgccgcgcgcgtccatttccctcctggtgcgctcaggcggtcaggcagcgcacgaggaggtgctgtggagcccaggaagagaggcaccagcgcacgaggaggtgctgtggagcccaggaagagaggcaccagcgcacgaggaggtgctggtagccatcgggtaggtcgaaaatataaaaaacatcatccaagcgcatcaggagccgcatagcgcgacttctgatgcgcttgcacccccgggggtactcgcttgtacatggtggagtattcagacgatgacagctgcacgcaccgacaccgacgacgacctgattgcacgggctgaggtcgcgaagatcttcgccgtcgccgagggcaccgtttccgcttggatggtccgcaagggtcctcagatcccaccgcccgtgatccgcggcaagaacttc

SEQ ID NO: 377 - DNA, 1356 bp, Unknown
  Description of Unknown: aquatic-non marine saline and alkaline-saline water sequence
atggaaaagaaatgcaaaactactattgtattttctgctgtcgccaaagatctcctggtcgcgctggctaaaaagtatggcctgactatgacggccacgctggagatgatccttcgtgacagggctaaacaggagggtccctggcaataatccgcacccattgtgcatctactgaaaaatacataacatcgccgaaatactcatgcggagatgtaaaacgcctggggatggtcgaggttcaactaagccaaatgaaccaggaatcctacactcgttaggtaatgaaaatgcacagagcacatcaaattcgattgaatccaacgccggaacaggaacaatatctttggcgttgcgctggcgtggcccgcttcacctggaattgggcgctggcggcttacaatgacactctggcccgcggcgagaaaccatcaagtagcaaaacgtgcaacgactgcggttatatcaccacgctaacgttgtctgaccgcgtatggacatgcccgaattgtggcgttgtccatgatcgagatatcaatgctgcgcaaaacctgcgtgattatcagcccgctagcgcagcttaatggaacacgtcgccgaggtactcacgcggagacgctaaacgcctagggatggtagtggtagtagtcacgccaaacgaactaggagttcacacactcgttagggttcaccccgcgagtgcgtggagtgagggtgcgatagaatacagataatgaaagttgagtaatattgatagctgattctggggcctaactcgtgatctatgctactgtttggttacctaaatcaccaagtgggattgcccgactactaaaagccggttatccgtgtgctccgtttgtgtttacggaacaaggtcgccaactagcacttggtatcaaacgtccgaatccctacatggcccaagacacattgccagatggtcgcatcattatcgtagtaagtgctatcgcgatcaatggagaggtacatgatagattgatacccgaccccattgcgctaccgatacccatactaagttggatgctaaccgctagtagcggcggtacacgtctaacagtggtatttgatcttcccgcggtttggcagtacgttgatacttacctggcgtttttagccagggatttccatgaccagttccacgcaatccaaactgcccgcgcagcattggtgaatgctgattgatttatgaggtttcacatgagcgaacgtagaaatatttccgtactggtcgaaacccgcaaaaaggtcaggctcctggccgctacgctgggagtcaacatggccgaggccgtcgaactagcagttgctaaactgctggacgagagcacgcccggt

SEQ ID NO: 378 - DNA, 1841 bp, Unknown
  Description of Unknown: wastewater metagenome sequence
cggctttgctatggcgtgcgtcaactggcggcccggcgatacgcccgcgccctaccaggtcgaagtgctggcggcgctggccgagcggcggcggaccagtgtgcgcgggccgcacgggctgggcaagacggcgctggcctcgctggccatcctgtggtttgcgctgaccagagacggggaagactggaagataccgaccaccgccagcgcctggcggcaattgaccaagttcctgtggccggagatccacaaatgggcgggccggctgcgctgggagttgatcggccgcgacccgctgaaccggcgcacggagctgctgacgctctcgatgaagctgcgcacaggggaggcatttgccctggcctcggacaatgcggcgctgatcgaaggcgcgcacgccgatcacctgctgtacctgttcgacgaagcgaaggttatcccgccggccacctgggacagcgcagagggcgccatgtcttccggtgacacctactggctggccatctcgacgccgggcgagccggtggggcgcttctacgacatccaccggcgccggccaggctatgaagactggtgggtgcgccacgtgaccaagaccgaagccatcgccgccggccgcatccgggccgattgggccgagaagcggcgccagcagtggggcgaaacatctgccgtctaccaaaaccgtgtcgaggggcaattcgccagcggcgatgaagacggcgttatcccgctgtcgtggatcgaggcggctaacgagcgctggcacagcctgaacgagacggacggttgggggccgctgctggccgtgggcgtggacgtggcgcgctacggggaagaccgcacggtgctggcgctcaggcacaggccgggcgtcaaggcgctgcgccggcacgccaaagaggatacgatggctacatcgggccgggtgacgggcatcctggaggcgcaagggggccgggccgtggtggacgtgatcggcgtgggttcgggcgtggtcgaccggctgcgcgagttgggcaagccggtgcaggcgttcaactcagccgagcgcacggacaagcgggacgcctctggcgagctgggctttgccgacaagcgcgcggcggcctactggcaggtgcgggagatgctggacccggccaacgcggacgccatcgccctgccgccggacgatctgctgacgggcgacctgaccgcgccgcactggcgggtgcagtcgggcggcaaaatccgggtggaaagcaaggacgacatccgggcgcggctgggcaggtcgccagacgatggcgacgcggtggtgatggcgttctgggaagaaccgcctgagccgaccggcggcgtggggtttgtgctgtaatgttaaaagcgcatgtgatccgtctcaacccaaccgaagaacaggccagctacttctggcgctgcgcggggattgctcgcttcacctggaattgggcgctggctgagttgaacgccgcctatgaccggggtgaacggcctgcgattggaacctgcaatgagtgcggccacgtcatggccgacatgccgctatcggtgcgctggtggcagtgcccgacctgcggcgcagaacatgatcgggacggcaacgcagcggtcaacatccgcaacgaggccgtgaagatggcaggcgctgcctagtgcgcccgtcgcggtagtaatcacgtcgagacgcaaaacgcctggggacggtgtaggtagcaaaccggatgaaccaggagttcacgcaattgaataggtgaacaagcataacacctggaaggagtgtctcagcgacacaactaaggactgacctatgacgatcctcatcaccatgcgcgagc

SEQ ID NO: 379 - DNA, 1004 bp, Unknown
  Description of Unknown: aquatic-freshwater-freshwater microbial mat sequence
gctcttggcgtcgctcccctcgaagtcgggcaggtagtcgttgacgttcttcgccaccacgtcaaacacttcgcgttcggtgcgttcgatgatgcttctcggctcgccctcgaaggggtagacccgctccgccttccactgctcgatcaacccccgagcttcctgcacgcgacgtgcgcggaagtatagtcttgcgcagaccaatggcaagcctccgctactcgtaccgcctctacccgacgacggagcagcgccgcgcgcttgctcagacgttcgggtgtgtgcgtgtcgcgtggaacgacgctcttgctcagtctcaagtgagcggtgcgaagtaccctgggttcgcggcgacgagcagactccttacggagtcgaagaagtcgcctgagcgcgcgtggttgaacgacgtgtccagcgtcccggtgcagcagtcgatccgaaatctcgacgtggccttccgccgcttctttaacgggctgaaaggcaaggggccgaaggtcggctttccaacttggaagcggaaggacggcaagcagtccgccgagttcaacgccgctaagaacgtcgtggcggcagggcttgccgacacggaaaacggacgtggagaatgggtaagccgggtggtgtcgatgggcactggcgttccgttcgttgaagcgtcaaccgccggggcctcccccggaatctccgccctttagggcggggaggatgtcaacggtacggctcgccgggaaagatagcccagggcgtttgtgggggttctctaaaaacggaagtgtgtgaaaaaaatgggcgcgtttgcagagggacgtcgcgctggtccccaaccccccttgccatggggcttttctcattctgcgaatcgcccttgccatcggcccttgggcgcatggcaagggccctgggacgagggggccctgggacgagggggccctgggacgagggggccctgggacgagggggccctgggacgaggggccctggggcgaggggccctggga

SEQ ID NO: 380 - DNA, 2945 bp, Unknown
  Description of Unknown: aquatic-freshwater-groundwater sequence
ttggggggtttggagtagttgtccggagtcatgatgttgaggttttgccgcgtgccaaggtctatgccaaccctgtccccgatttggcacctggcgccaaggtcaagcgaatgcccccacacgcccgtcttgtcgccaatggactccacaaggtattttgcaaacggcccgaccgactgcttgctgcccatggagagcatgtaatacgcgccagccgcaccttccacctggtccagcatcttgaagctaagctgcactccggcatattcgttctggtaaaacgcatgggccttggggcccgcatacactttggggtcgatgctccttcccgccccggtatttttcatcgtgcttgaaaggtagcctgcaccgccaaggccaacccctatccgccccgcacccggcttccacacccagccaaggttcaaatccacccctaccgtgcccatgaaggccttgtcggttggcgtcaccccgcctggcaaatacatctgcatcatcactttgggcgagttgccatcgaacccaatcttggaaagggcaaaatttttcctgttcacatttccaaccgcaagccccatcgcggaaatattgaacccttcctccggcttgtcctggtagccgaatgcaaatccaaggtatggcacttcggaatcaagctgggtcctttttccccacgcgccaatgaggttcagcgggcttttctccacccaggcggcaacgccaaggccgtgccctaaattgtacccataatatatccctgcctgtgcggcatcagtcacttttgtcgcaacagaaaatcccatgttggaaaatgcgaaattggccgactcctgcgccatggaaaacaggcgcccggtcccccgcttcaaaagctcggaatagcttatgtcaagaagcgcattggccgcagcttccaaccggagcctgcccgttgtttgggcatccggcccccttattttctcaatttcaacaaattcgctttccatcccgttggcataaaacgcctgcttcagcgatggaagcgagagcaggctgccggcaacgagcttctgcgccttgttggatttccaatctacattttgcacttgcgggaagattgttcccaaatccatggcgcggctgcgtgttgaggaaaatgcgttctccccaggtttagcctccatcggaattgcgccatccaccagcccgtcatcctccggaaccgtggttggcttctttttcccagcatcagcaaggtcatcctccggaatcgtggtcgggattttcttcttttttgcctcttcctcttcaggcggaactgtggaaggctttttctttcctccatccaccagcccgtcatcctcaggaacagtggttggcttctttttcccagcatcagcaaggtcatcctccggcacagtggttggcttcttcttcccaatatcagcaagcccatcctccggcacagtggttggcttcttcttcccaatatcagcaagcccatcctccggaaccgtggtcgggatttttttcttttttgcctcttcctcttcaggcggaactgtggaaggcctcttcttggcggcatccgccaaatcatcgccaggcactgtggatggcgtttttttctttccagcgtctgccactactggcggctgctcggcttcgggtttttcaggcgcatcctttaggggaagagcaaggccgtgcgctgccattctcctgttccatgcttcacgcaccgccaatggcacgcgttcactcacggcttcggccggatttttgctatttcgaatggccgcatccgccaacttgattatcatgtcttctttttccttagcagtgcccgcgcctttcattttcagcaaatcctgggcgaatttccgaaacgaatcccccaccgcgatgcttttgttgcgctcggcaggaacgcgcctccaatagtcatcctcggttatttccccggcgttcactttcttcgtgtttccattcatgaggccgtcatattttgcccgttcgatttcctttgccttcttctccgcctgcccaagctgcgcagtttccccgtatttcaccgcctgcatcaggaaaaacatattttcatccgacaactgctttcaaatgggcgatttattaatatgcatggtgcgcgctaaatccagcgagttttacatggcactccgccgccttaactccggagttttcggaaagcccggaaagccaccctttcgaaagccgtatataaaccacatcattcttttttccgggatgttccaatgaggtcatacaaattccgcatctatccttccaagaatcaggaaaaggaaatgctgcatcacttatgggttgcaaaaaacctatggaatgaattacttgcacactgcaaatcattctatgcctatttccagaaattcccctcaaaatcagcgctgcaaatcatgtcaaagagttcaggtttgttttcacaaacctcacaggaaatagcgcacagggtggaaaaggcaatttggagatttgtcatgatgaaaaagcagggtaataaagcaggcttcccaaggttcaagccttttgagaaaatgaaatcattgcattatccgcaatatggaaacggctttttccttgataaaacgcttgaagcctctccatttgggaaaatccagattgtaaggcactcgtgcggcaattcccttgaccgggatataaatgccgccctgaacatactcacacgagctacggccggaatggccggaagtaacgcctccggagacgaaacgataattccgtcattgaaggaggaagcccacgccttcacgcgtgggtgattcaccttattcgagcggcttgcgcgcaaaagcaagatacccggtgtgcgtgaggccggtgttttccgggcgcacccccgcatcgcgcaccagaatctcgcgcataatcacttcgcagcaaaacgtgccaggggaaaagcc

SEQ ID NO: 381 - DNA, 1134 bp, Unknown
  Description of Unknown: aquatic-freshwater sequence
taaaagatgtaaaacacactgtcaaaacacagtttgaaattaatgtaatatacgaattttcatctagcaaataacaatggctgtacacctacttaattcgccaatcatgatggacatggggaccttcatacatgagggccctattcgccttccggaagtagaaagaatcataaaaaatggcttcatttctggaattacccagcttgatacagccagatacttaacatcactgttgggggttcatgtggaatttaaaccagttattacattgctcttcaaaaatcacccttaacctcttaagcatttctttattgatacattgagagcgatatttggttactaacactaaatgataatttagcttataaacagcatggaagtggctttttgtaagggtatttttcatattcacatattaacactaattgatttatctgttataatagatccatgctttcgcacaaaggatatgtttaccgattaaagcctaacgctgaacaagaactcttacttgcccagcattttggccatgtccgctttgttaagaattgacaagatctatagcaaaaacttgtctcgccgccagcttcaagatcacctagttaaaaagaagaaaaagagcaaatttacatggctcaacgaggtgaactctcaatcattattagcagctctattggacgtagataatgcttttaagcgattttttacacaaggggctggtcaatacaccaggtcgctaggtacttgcgaaactgtaaagcgctccccagtctctatatccgttggtgcggatgagtttgcgaaaggttccaagaagtttggaacgggtcggttagaagaagctccagctatagccgctttagcggcttagcgggagtagttcaccttcaccaggttgacgatgatttccaaatgaaggcaccttcaaaagtcagccactaatcttatcctcaatttgcttaatcacgcttctaccagaatcatctttcacagcaaatagaaacaagcatttccctctactggctttttcccattgcaagccaatatttttcttctcttgagaatcatcattgcttgcataaacctcgcccttgtattcaatcgccattattcggccatcagtaagctcaacaa

SEQ ID NO: 382 - DNA, 1253 bp, Unknown
  Description of Unknown: gut metagenome sequence
ccaaaggttgtaaaagttacaaaaactgattatactcttgacaatgatgatgtttatgaacatacctttaaaaatagaataacaatttatgttaagagcaatcaaaataagattatatccaaacaaaacacaagaacaaacactaaataaggtgcttggtagttatcgttttgtctataatcaagtacttgctcaaaaacaaaatgcttataaacaagacaagacaaacctaaaggtaactgatttgtcaaagtggtttcactgaactctgctgaaggatgaacattatgcttggttgaaagaacagaacacaaaggtgatgaaacaagccatcagacagatggacggagcgtaccagaagttcttcaaacaacataacggattcccaaaatttaaatccaaaaaggataagcaatccgcattgttcccttatgaagctatttcaaaacataatacatttgaaacaagaacttgttcggtttgtggttacaagaaacaagatttgaggttaagtgacagagaatgggtttgtcctaaatgtggaacaaaacacaatagagatataaatgctgctgtgaacatattgttggaaggacaacgaatgctcacagcaggataagataaaatgaaatacagtaggtgtccgtagcaccgaatttacgcttgtggactatcctcctatggatgaccgttctgtaatgaacctaaaagtagtgatagattgaaacaagaagtgaaatatacctaaatcatagattttcgtagaatttcatatacggtaatttcaatgataacagacttacttctgatatgacagaagatgaatgttatctcttggttacaggtaaaaccaaggcacaatacgaagaaagtaaaagaaaaagtgaagaagaatatcgaagaagagaagaagaggataagaaacaaattccagaattatgtaaggcatatgagaaggattggagtttctacagtcttctgtgtcttggtatttgcaactgcaccaagatttctttgaataggacgtctaactctgtttaaagttacacatggtaatactacttttttcatattattttttaatttattttattgaatatttgtcaaattagtgaaactgcacgttgatacattactgtttcaatatatgtatcaatatctcttttttcaatgcctattgatacaagtatgtctgtcatctgttcaacatcttctgagtcaacacaaaggacaaaccaacctttcttgtcact

SEQ ID NO: 383 - DNA, 1386 bp, Unknown
  Description of Unknown: aquatic-non marine saline and alkaline-saline lake sequence
gcgaatgacgatgtgaacgtggtcggcctcgccattcaactcaacgaccgtgaacgccatctccgtcgcgacacggcgcatcgccgcctcgatcgttgcgagccctttcgcgtccaggaccttccgccggtacttcgttacgcagaccaagtgggccaaaaacttcgtaacgctgtgccgccccttgtctagcccttgcgttttcgccacgcgggcaccatactctcgtgcagaccaatgacaaatcgtctccgctactcgtaccgcctctaccccacgccggagcagcgccatgcgctcgctcagacgttcggctgcgcgcgagtggtgtggaacgacgctctcgcccgggctcaggtgggcggtgcgaagtaccccggtttcgccaatgctgccaagaatgttgtcgcggcggggctcgccgagacgaaaaacggacgtggagaatgggtaaatcgggtggtgtcgatgggcactggcgttccgttcgttgaagcgtcaaccgccggggcctcccccggagtctccgccctttagggcggggaggatgtcaacatcgacgcaagacaagacagctctctgccgagtctagctggcttgataggggaggctctcgtcctacggttacacacccttctccctttttcgtggctatctccgatgctctttcggccaagatctccgaggccctggaactgatcgactcctttgcggagcccaagcgctccgcctgtctttggagcagcggcaaggactccatgctgctgctgcatttgctcagaaaggcggggatcgacctgaggactctctttcttcagcgtcagtctacgaggactgaatggcttcctccttagccgaaggcttacggatgtgggagcgaacgaagccagcgcaagccgaaggcttacggatgcggctgcttaagacgctgcgcgtcttttcaacccttcatacaccctctgctgccacctcttttgatccattgccagcagagcgcaggacgtacgccgctctcgcatgtatcgatccaggtggctgtcatcgtttcgcaagccgaaggcttgcgggggtgagagcgatagaccctgcgcaagccgaaggcttacggatgcgggagcgagagacgctgcgcaagccgaaggcttacggatgcggctgcttaagacgctgcgcgtcttttcaccccactgagatgggtggcacattcctcccgcatccgattgcttgagcactgcaatgcgttctgcacccacttgtggttgactccccttgaagcgctcactccccctcctcccgatcgtcttcgccccagcattccttgcttccgtcgcgaaatccctccaggaagcagaatccctgccactcagcctcccacctctcgtccat

SEQ ID NO: 384 - DNA, 29 bp, Artificial Sequence
  Description of Artificial Sequence: Synthetic oligonucleotide
ccctcactccacacccgcgcggggtaacc

SEQ ID NO: 385 - DNA, 37 bp, Artificial Sequence
  Description of Artificial Sequence: Synthetic oligonucleotide
atgtcactttcctatccattcaaaccgatcccgcaag

SEQ ID NO: 386 - DNA, 20 bp, Artificial Sequence
  Description of Artificial Sequence: Synthetic oligonucleotide
cagcacctcctcgtgcgctg

SEQ ID NO: 387 - DNA, 65 bp, Artificial Sequence
  Description of Artificial Sequence: Synthetic oligonucleotide
gggcggttcgccgaatgagacagagcccatgccatggggacttcccgaccacgccaccatggcag

SEQ ID NO: 388 - DNA, 27 bp, Artificial Sequence
  Description of Artificial Sequence: Synthetic oligonucleotide
tgggaagaagaagccaaccactgtgcc

SEQ ID NO: 389 - DNA, 29 bp, Artificial Sequence
  Description of Artificial Sequence: Synthetic oligonucleotide
ccctcactccacgcacccgtggggtgtac

SEQ ID NO: 390 - DNA, 29 bp, Artificial Sequence
  Description of Artificial Sequence: Synthetic oligonucleotide
ccaatcgcccacgtacgcgtgggcccgac

SEQ ID NO: 391 - DNA, 29 bp, Artificial Sequence
  Description of Artificial Sequence: Synthetic oligonucleotide
ccctcaccccacacgcacgtggggcgtat

SEQ ID NO: 392 - DNA, 37 bp, Artificial Sequence
  Description of Artificial Sequence: Synthetic oligonucleotide
ctgacatatcctctactcaatttcacgcattcacacg

SEQ ID NO: 393 - DNA, 36 bp, Artificial Sequence
  Description of Artificial Sequence: Synthetic oligonucleotide
ctgacatatcctctactcaatttcacgcattcacac

SEQ ID NO: 394 - DNA, 26 bp, Artificial Sequence
  Description of Artificial Sequence: Synthetic oligonucleotide
ccgcatccgtaagccttcggcttgcg

SEQ ID NO: 395 - DNA, 29 bp, Artificial Sequence
  Description of Artificial Sequence: Synthetic oligonucleotide
ccgcatccgtaagccttcggcttgcgcag

SEQ ID NO: 396 - DNA, 23 bp, Artificial Sequence
  Description of Artificial Sequence: Synthetic oligonucleotide
gtagatgtgaaggttgatgaaga

SEQ ID NO: 397 - DNA, 35 bp, Artificial Sequence
  Description of Artificial Sequence: Synthetic oligonucleotide
tatgtaattatgtatgtagttttatgtgtaatatt

SEQ ID NO: 398 - DNA, 23 bp, Artificial Sequence
  Description of Artificial Sequence: Synthetic oligonucleotide
ctgaccacgacgccccgtcacgg

SEQ ID NO: 399 - DNA, 23 bp, Artificial Sequence
  Description of Artificial Sequence: Synthetic oligonucleotide
ctgacaagcgccgcccgtcacga

SEQ ID NO: 400 - DNA, 34 bp, Artificial Sequence
  Description of Artificial Sequence: Synthetic oligonucleotide
acctcgtgctcactcaactcgatgatctgctcaa

SEQ ID NO: 401 - DNA, 36 bp, Artificial Sequence
  Description of Artificial Sequence: Synthetic oligonucleotide
gtgaccacgtcgacgctttccttcgcgcattgcaag

SEQ ID NO: 402 - DNA, 29 bp, Artificial Sequence
  Description of Artificial Sequence: Synthetic oligonucleotide
ccatcactccacgcgcctgtggggtgaac

SEQ ID NO: 403 - DNA, 63 bp, Artificial Sequence
  Description of Artificial Sequence: Synthetic oligonucleotide
actacatggcgaaaccacgaaccaaacaagagtacggcccgtttagcgtgcgtctgcctgttg

SEQ ID NO: 404 - DNA, 97 bp, Artificial Sequence
  Description of Artificial Sequence: Synthetic oligonucleotide
aagagatgcggtcgcttcactcgatggtgcttgttctactacgctccgctttagaagcgcgtcttcaagcagaatcaacatcatcgagtgttgggaa

SEQ ID NO: 405 - DNA, 106 bp, Artificial Sequence
  Description of Artificial Sequence: Synthetic polynucleotide
gaacaagagatgcggtcgcttcactcgatggtgcttgttctactacgctccgctttagaagcgcgtcttcaagcagaatcaacatcatcgagtgttgggaacggcg

SEQ ID NO: 406 - DNA, 54 bp, Artificial Sequence
  Description of Artificial Sequence: Synthetic oligonucleotide
gttcgtggtttcgccatgtagttattctaccaccaaaacaggtacacggtcaac

SEQ ID NO: 407 - DNA, 98 bp, Artificial Sequence
  Description of Artificial Sequence: Synthetic oligonucleotide
ggtgatatggcaaagaaagagagactcaagaccatcaacatcttgttgcgcttgccgcccgagcttcacgccgcgctgaaaaggtgggcgcaagagga

SEQ ID NO: 408 - DNA, 96 bp, Artificial Sequence
  Description of Artificial Sequence: Synthetic oligonucleotide
tgatatggcaaagaaagagagactcaagaccatcaacatcttgttgcgcttgccgcccgagcttcacgccgcgctgaaaaggtgggcgcaagagga

SEQ ID NO: 409 - DNA, 50 bp, Artificial Sequence
  Description of Artificial Sequence: Synthetic oligonucleotide
tggtgatatggcaaagaaagagagactcaagaccatcaacatcttgttgc

SEQ ID NO: 410 - DNA, 126 bp, Artificial Sequence
  Description of Artificial Sequence: Synthetic polynucleotide
ggcaaagaaagagagactcaagaccatcaacatcttgttgcgcttgccgcccgagcttcacgccgcgctgaaaaggtgggcgcaagaggaacgtcgcccgctaaactggcagatcgtgcgcgttct

SEQ ID NO: 411 - DNA, 131 bp, Artificial Sequence
  Description of Artificial Sequence: Synthetic polynucleotide
ggtgatatggcaaagaaagagagactcaagaccatcaacatcttgttgcgcttgccgcccgagcttcacgccgcgctgaaaaggtgggcgcaagaggaacgtcgcccgctaaactggcagatcgtgcgcgt

SEQ ID NO: 412 - DNA, 108 bp, Artificial Sequence
  Description of Artificial Sequence: Synthetic polynucleotide
ctgcgaagaacattgtcgcggccgggcaggtcgagacgaaaaacggacgtggagggcatgtgagacggatggtgcctttgggcacctgcgcagtgctcgatgaagcgt

SEQ ID NO: 413 - DNA, 101 bp, Artificial Sequence
  Description of Artificial Sequence: Synthetic polynucleotide
tgcgaagaacattgtcgcggccgggcaggtcgagacgaaaaacggacgtggagggcatgtgagacggatggtgcctttgggcacctgcgcagtgctcgatg

SEQ ID NO: 414 - DNA, 119 bp, Artificial Sequence
  Description of Artificial Sequence: Synthetic polynucleotide
cgcacgaggaggtgctgtggagcccaggaagagaggcaccagcgcacgaggaggtgctgtggagcccaggaagagaggcaccagcgcacgaggaggtgctggtagccatcgggtaggtc

SEQ ID NO: 415 - DNA, 129 bp, Artificial Sequence
  Description of Artificial Sequence: Synthetic polynucleotide
agcgcacgaggaggtgctgtggagcccaggaagagaggcaccagcgcacgaggaggtgctgtggagcccaggaagagaggcaccagcgcacgaggaggtgctggtagccatcgggtaggtcgaaaatat

SEQ ID NO: 416 - DNA, 81 bp, Artificial Sequence
  Description of Artificial Sequence: Synthetic oligonucleotide
tcgagacgaaaaacggacgtggagggcatgtgagacggatggtgcctttgggcacctgcgcagtgctcgatgaagcgtcaa

SEQ ID NO: 417 - DNA, 63 bp, Artificial Sequence
  Description of Artificial Sequence: Synthetic oligonucleotide
cctcaacatccggcgcgggcggctacagactgcgggttgtcagattgttaaatgccgcccgca

SEQ ID NO: 418 - DNA, 65 bp, Artificial Sequence
  Description of Artificial Sequence: Synthetic oligonucleotide
cctcaacatccggcgcgggcggctacagactgcgggttgtcagattgttaaatgccgcccgcacc

SEQ ID NO: 419 - DNA, 65 bp, Artificial Sequence
  Description of Artificial Sequence: Synthetic oligonucleotide
tgaacattgcgtcgaatctcgctaccgtcaaatcggcggaaagtcaagcctgtggataggccggc

SEQ ID NO: 420 - DNA, 55 bp, Artificial Sequence
  Description of Artificial Sequence: Synthetic oligonucleotide
cccgcagtctgtagccgcccgcgccggatgttgaggagtaaacaatggacactct

SEQ ID NO: 421 - DNA, 57 bp, Artificial Sequence
  Description of Artificial Sequence: Synthetic oligonucleotide
tgacctcagtacgaagtgcacggcaggcgcaccgagtaccggacggcttgagacatg

SEQ ID NO: 422 - DNA, 133 bp, Artificial Sequence
  Description of Artificial Sequence: Synthetic polynucleotide
tgcgcctgccgtgcacttcgtactgaggtcaagtatactgcaaaattctgcacttgtcaagcattaatttgcgtgagtttcttgacagtctgcacaagtttgcagtataatggactcatgaacagagcacacc

SEQ ID NO: 423 - DNA, 58 bp, Artificial Sequence
  Description of Artificial Sequence: Synthetic oligonucleotide
tttagctacttaaaaacagagttcaatcgtttgcgcagtgaagacgggtttgccccgt

SEQ ID NO: 424 - DNA, 96 bp, Artificial Sequence
  Description of Artificial Sequence: Synthetic oligonucleotide
cgggtttgccccgtttgtatcagaggttcaaagctacgcatatcagcaggcgtcaaagacttgtaacgcttgcggggaaaaggtagatgcattgcc

SEQ ID NO: 425 - DNA, 61 bp, Artificial Sequence
  Description of Artificial Sequence: Synthetic oligonucleotide
catttcaccaacaatcccgctggcaggcggagagaggcaggcagaacatgaacacacgccc

SEQ ID NO: 426 - DNA, 67 bp, Artificial Sequence
  Description of Artificial Sequence: Synthetic oligonucleotide
tagctacttaaaaacagagttcaatcgtttgcgcagtgaagacgggtttgccccgtttgtatcagag

SEQ ID NO: 427 - DNA, 113 bp, Artificial Sequence
  Description of Artificial Sequence: Synthetic polynucleotide
ggtgtctcggtttacgtggaactgggcattagcagcgtataacgatggcgttccgtttagctacttaaaaacagagttcaatcgtttgcgcagtgaagacgggtttgccccgt

SEQ ID NO: 428 - DNA, 114 bp, Artificial Sequence
  Description of Artificial Sequence: Synthetic polynucleotide
gtctcggtttacgtggaactgggcattagcagcgtataacgatggcgttccgtttagctacttaaaaacagagttcaatcgtttgcgcagtgaagacgggtttgccccgtttgt

SEQ ID NO: 429 - DNA, 60 bp, Artificial Sequence
  Description of Artificial Sequence: Synthetic oligonucleotide
ctacttaaaaacagagttcaatcgtttgcgcagtgaagacgggtttgccccgtttgtatc

SEQ ID NO: 430 - DNA, 70 bp, Artificial Sequence
  Description of Artificial Sequence: Synthetic oligonucleotide
gacgcatttgttggttcgccggaatgggacgaacacgacattcgggaacgcatggaggaagaagcagagt

SEQ ID NO: 431 - DNA, 82 bp, Artificial Sequence
  Description of Artificial Sequence: Synthetic oligonucleotide
aacagtattgaatgtcgccgtcgggcagacggagactctaaacgctcgctgagcggacggccgctgtcgtggaaggatgtgc

SEQ ID NO: 432 - DNA, 125 bp, Artificial Sequence
  Description of Artificial Sequence: Synthetic polynucleotide
agtattgaatgtcgccgtcgggcagacggagactctaaacgctcgctgagcggacggccgctgtcgtggaaggatgtgctctttcgcgttcatgctgactgcgttgaagcgagaatccctctacg

SEQ ID NO: 433 - DNA, 133 bp, Artificial Sequence
  Description of Artificial Sequence: Synthetic polynucleotide
tctttaacagtattgaatgtcgccgtcgggcagacggagactctaaacgctcgctgagcggacggccgctgtcgtggaaggatgtgctctttcgcgttcatgctgactgcgttgaagcgagaatccctctacg

SEQ ID NO: 434 - DNA, 138 bp, Artificial Sequence
  Description of Artificial Sequence: Synthetic polynucleotide
tctttaacagtattgaatgtcgccgtcgggcagacggagactctaaacgctcgctgagcggacggccgctgtcgtggaaggatgtgctctttcgcgttcatgctgactgcgttgaagcgagaatccctctacgattcg

SEQ ID NO: 435 - DNA, 72 bp, Artificial Sequence
  Description of Artificial Sequence: Synthetic oligonucleotide
gaatctgttagtagattttcattattagaagcacacttaactcccttgttggtgtgcttctctcttttctac

SEQ ID NO: 436 - DNA, 94 bp, Artificial Sequence
  Description of Artificial Sequence: Synthetic oligonucleotide
cagtctttagtttctcgtttgagggagttggataatacgtattgggattgttttttaaagagaaaagaaggagcccaacttccttgtggcgtta

SEQ ID NO: 437 - DNA, 89 bp, Artificial Sequence
  Description of Artificial Sequence: Synthetic oligonucleotide
ttagtttctcgtttgagggagttggataatacgtattgggattgttttttaaagagaaaagaaggagcccaacttccttgtggcgttat

SEQ ID NO: 438 - DNA, 114 bp, Artificial Sequence
  Description of Artificial Sequence: Synthetic polynucleotide
caatgatcattgcaaaagggatgcgaaaataggtttttaagtgataatccacaaaacatatcagtttagattaaagccaacaaaagaacaggaggctttgttttggcggttttc

SEQ ID NO: 439 - DNA, 89 bp, Artificial Sequence
  Description of Artificial Sequence: Synthetic oligonucleotide
gagcaggagctactgcgaggagcagactgtgacgaagcgagcatacaagttcaggtgttatccgacagatgagcaaaagcagattcttg

SEQ ID NO: 440 - DNA, 59 bp, Artificial Sequence
  Description of Artificial Sequence: Synthetic oligonucleotide
gagcaggagctactgcgaggagcagactgtgacgaagcgagcatacaagttcaggtgtt

SEQ ID NO: 441 - DNA, 75 bp, Artificial Sequence
  Description of Artificial Sequence: Synthetic oligonucleotide
gaaagagagaatcctcggacgagccgcgcagcttttcaaccagcagggatacttcggctcgtcactctccgatat

SEQ ID NO: 442 - DNA, 67 bp, Artificial Sequence
  Description of Artificial Sequence: Synthetic oligonucleotide
catgtaggcatgtcctagatgtctaagtattggagaacggatttttatgagcaaaggtgagcaaacg

SEQ ID NO: 443 - DNA, 92 bp, Artificial Sequence
  Description of Artificial Sequence: Synthetic oligonucleotide
acgaagcgagcatacaagttcaggtgttatccgacagatgagcaaaagcagattcttgctcgcacgttcggctgctgtcgctgggtctacaa

SEQ ID NO: 444 - DNA, 88 bp, Artificial Sequence
  Description of Artificial Sequence: Synthetic oligonucleotide
acgaagcgagcatacaagttcaggtgttatccgacagatgagcaaaagcagattcttgctcgcacgttcggctgctgtcgctgggtct

SEQ ID NO: 445 - DNA, 89 bp, Artificial Sequence
  Description of Artificial Sequence: Synthetic oligonucleotide
gcggtagtaatcacgtcgagacgcaaaacgcctggggacggtgtaggtagcaaaccggatgaaccaggagttcacgcaattgaataggt

SEQ ID NO: 446 - DNA, 90 bp, Artificial Sequence
  Description of Artificial Sequence: Synthetic oligonucleotide
gtcgcggtagtaatcacgtcgagacgcaaaacgcctggggacggtgtaggtagcaaaccggatgaaccaggagttcacgcaattgaatag

SEQ ID NO: 447 - DNA, 130 bp, Artificial Sequence
  Description of Artificial Sequence: Synthetic polynucleotide
gaggccgtgaagatggcaggcgctgcctagtgcgcccgtcgcggtagtaatcacgtcgagacgcaaaacgcctggggacggtgtaggtagcaaaccggatgaaccaggagttcacgcaattgaataggtg

SEQ ID NO: 448 - DNA, 141 bp, Artificial Sequence
  Description of Artificial Sequence: Synthetic polynucleotide
cgcagcggtcaacatccgcaacgaggccgtgaagatggcaggcgctgcctagtgcgcccgtcgcggtagtaatcacgtcgagacgcaaaacgcctggggacggtgtaggtagcaaaccggatgaaccaggagttcacgcaa

SEQ ID NO: 449 - DNA, 63 bp, Artificial Sequence
  Description of Artificial Sequence: Synthetic oligonucleotide
ctatcggtgcgctggtggcagtgcccgacctgcggcgcagaacatgatcgggacggcaacgca

SEQ ID NO: 450 - DNA, 68 bp, Artificial Sequence
  Description of Artificial Sequence: Synthetic oligonucleotide
gctggctgagttgaacgccgcctatgaccggggtgaacggcctgcgattggaacctgcaatgagtgcg

SEQ ID NO: 451 - DNA, 29 bp, Artificial Sequence
  Description of Artificial Sequence: Synthetic oligonucleotide
ccatcactccacgcacccgtggggtgaac

SEQ ID NO: 452 - DNA, 27 bp, Artificial Sequence
  Description of Artificial Sequence: Synthetic oligonucleotide
cttttaagccgcgtatgcgcggcgaac

SEQ ID NO: 453 - DNA, 41 bp, Artificial Sequence
  Description of Artificial Sequence: Synthetic oligonucleotide
agtggtttgactgttgcgttcatggtgtatttattttacct

SEQ ID NO: 454 - DNA, 34 bp, Artificial Sequence
  Description of Artificial Sequence: Synthetic oligonucleotide
acctcgtgctcactcaactcgatgatctgatcaa

SEQ ID NO: 455-500 - skipped (46 entries)

SEQ ID NO: 501 - protein, 560 aa, Unknown
  Description of Unknown: hypersaline lake metagenome sequence
MRQTLTLCRPARLISSEVRLDQEYRAARWAHHRLLDFEDEHQRHLNQVAEAIVPGIVRVGRVIARLSRRAKRRSRATRGSWTPDPRPQLMTSLRARLVEMKKQRDADPRWKAALAWGDDAVGAPKKVRRRRAKDPSKVKRRKNESDEAWANRFAMLTSDETAEHFEAKVAAAPRRSRREEYRAALYAQRRCYHGTWNALVRSVDQARSDVLRQRRSGLPADWRRPRFGGSQSICADRSGFRVVERGKPWWVVEMRIGTASGKGAEWVRLRAKCGNWHAIPDDAAITTAKLTRRKDGQRWSYSLSLTVDGAQKAARAASSSGLVSFDWGHREHGHPRARDGIRAFVWLGDDGSTGEVIIPAECRQCLDEIDALKSRVDQAFDARRESMGLRDKNRHTYRRRVLRSGVRTEEEAQWLTWETRYERRVARLRKRWQSLRREAYTRAVRELRTQYARFAFETESSASLKRQQRDEHMRRRARANRDLTARYEFVSLCERFGAEIIPVSARNTTKECPSCGHLGDNTSELVTVCPACGTARDKDVGAAEVILRRAEEALAKHSAE

SEQ ID NO: 502 - protein, 523 aa, Acidobacteria bacterium
MTIRVIHRPAKVVDGLEALDREFRSARWAHHQLLRIEDDQAEQLDLVADMCAPGLRRVGRILAKLRRRACRAERATGWSPNPRVELRKTMAARMRSLKAQRDADPRWKIARGWLDASADDAPVKACRRKAGESDALYDARVARRKRRSRREEKRLELYSQIRCHYDTWNELVKQVDQAIRSVRAVRKTGQSARWKHPRYDDPTTIASDHWDLVERGPVWWVIDLKLRAGVRVRLRTKAGTYDGVPADPDFRTLKLTRRRVGRFGWEYSCSIAVNLAERVPSGTGVVALDWGHREHGHATADQGIRVFTWAGDDGQTGEVLLPIACRDLLSELDELKGRLDTVYAARGEPELNRARYRRRLNMCGVLTREEQDWLRWETRQDRRLSAMRDRIEHIRRESYLKAIHELGRRYRVFAFEDLQGQQIKDLQTENQMGRRKRQNRDLSARYLFESLCKQSGAERITVPARNSTRQCPACGKLREKTADLLVACDACGYVGDRDRDACRTLLARAKEALAKRGASVQND

SEQ ID NO: 503 - protein, 552 aa, Unknown
  Description of Unknown: aquatic-freshwater-groundwater sequence
MLTLNRPALLESDEQRLDAEYRSTNWAHHRLLDFEQEHQRVLDAAADEIAPGIIRAGRIVARLARRAKRADRTTGGQWFPPPRSELCTRLRVLLGELREQRNADPRWKLALGWADEQVGEPKAPRRRRAKPSSAVKRRKAETDDAFAKRFALLTSDESAEHYAAKLATPPRDSRRDMARKALYQQRRIYWGTWNALIRSVDQARKDVLDHRKRGMPADLRRPKFRDPSSIAADAGGFRIVERGALWWTIEMRIGLGDEWARVRAKCGNWHAIPSDAKIGTAKLTRRRDGHRWSYSLSLTVDVAKNVDAHAPRGVVSFDWGHREHGHPSWRDGIRAFTWLGDDGATGEVLIPIECRQALDEIDAMKARVDGAFNARKKAHDLPDVNRYTYRQRLMASGVRTEEQTAWLRWEMRYERRMDARRDRVQNLRKDAYTRAVRELRSRYAVFAFEDEDGASIRREQKEEQVLRRKRSNRDLATRYEFVALCERYGAELIAVPARNTTRECPDCGELLKENGPELLVVCPGCGTARDKDHGAARVILGRAKEALAKRAA

SEQ ID NO: 504 - protein, 560 aa, Unknown
  Description of Unknown: aquatic-marine-estuarine sequence
MRQTLTLCRPARLISSEVRLDQEYRAARWAHHRLLDFEDEHQRHLNQVAEAIVPGIVRVGRMIARLSRRAKRRSRATRGSWTPDPRPQLMTSLRARLVEMKKQRDADPRWKAALAWGDDAVGAPKKVRRRRAKDPSKVKRRKNESDEAWANRFAMLTSDETAEHFEAKVAAAPRRSRREEYRAALYAQRRCYHGTWNALVRSVDQARSDVLRQRRSGLPADWRRPRFGGSQSICADRSGFRVVERGKPWWVVEMRIGTASGKGAEWVRLRAKCGNWHAIPDDAAITTAKLTRRKDGQRWSYSLSLTVDGAQKAARAASSSGLVSFDWGHREHGHPRARDGIRAFVWLGDDGSTGEVIIPAECRQCLDEIDALKSRVDQAFDARRESMGLRDKNRHTYRRRVLRSGVRTEEEAQWLTWETRYERRVARLRKRWQSLRREAYTRAVRELRTQYARFAFETESSASLKRQQRDEHMRRRARANRDLTARYEFVSLCERFGAEIIPVSARNTTKECPSCGHLGDNTSELVTVCPACGTARDKDVGAAEVILRRAEEALAKHSAE

SEQ ID NO: 505 - protein, 560 aa, Unknown; identical to SEQ ID NO: 504
  Description of Unknown: aquatic-marine-estuarine sequence

SEQ ID NO: 506 - protein, 541 aa, Unknown
  Description of Unknown: aquatic-marine-seawater sequence
MMKALARPARLVTGQAELDAEMRSARWIYHRLLDFEDAHQQVLDAAAEAVAPGISRVARLVARLLRRTRRRERTASSSWSPNPHSAWLAGLRAQLNALRKVRNAHQVWRDAVKWADTPAPGAPERGGPRRRAGETAEEFAARCATRRTMLTRREAWRAELYRGHVADGARGRSRIYWGTWNSLLKSVDQARKSVLQARKAGLPANWRRPQWNDPSTIAADAGGFRVLERGRPWWALETRLCDGWVRFRAKCGNWHSIPESAKLRTLKLTRRKNGCGWSYSVSIAVAGMPEPAHAGDGVVALDWGYREHGHPHERDGLRVFTWRGEDGAIGEILLPSECRAAKDREQQLQARIDAIWNARCASMKLPERNRHSYRSRLMRSGVRTAEEQRWLNWETRYERRRAAARKRWQNLRSETYLQAVHALRRRYDMFAVENETIVGHRRTDKDEQTRHRKRQNRELSARYEFLQICERSGATILPVPSRNSTRECPHCGGLHENGPELYRACPATGVVDDKDEIACVTILARAKAALANRAVSAEKHA

SEQ ID NO: 507 - protein, 559 aa, Unknown
  Description of Unknown: aquatic-non marine saline and alkaline-hypersaline mat sequence
MTILTLNRPALIISDDVRLDAEFRAARWAHHRLLDFEDQHQRHLDEEAERCAPGIVRVGRIIARLSRRAKRMSRATRGSWTPDPRPQLMASLRVRLAEMKTQRDADPRWKAALAWADEPIGAPKKVRRRRAKDPSKVKRRKSETDEAFEKRFALFTSDETEEHYQKKVAAAPRRTRREEYRAELYTKRRCYWGTWNALLRSVDQARSDVLTQRKKGLPADWQRPRFGDAQSLSAESGGFRIVERGKLWWVIDLRIGTATGKNAEWVRVRAKCGNWHHIPEGASITTAQLTRRKDGQRWSYSLSLTVDGAQKSAREVSNTGLVSFDWGHREHGHGRAKEGIRAFVWIGDDGQQGEVILPAECRRCLDEIDALKSRMDQAFDARRESMGLREKNRHTYRRRLLRSGVQTDEEGQWLTWEMRYERRVGRLRKRWQNLRKETYVQAVRALRSRYAQFAFESESNASLKRQQKDEQMLRRARANRDLTARYEFVSLCERFGAEIVPVSARNTTKECPSCGHLGDNTAELVTVCPACGTARDKDFGAAKVIFRRAEGALAKHAAE

SEQ ID NO: 508 - protein, 471 aa, Unknown
  Description of Unknown: aquatic-non marine saline and alkaline-hypersaline mat sequence
MASLRVRLAEMKTQRDADPRWKAALAWADEPIGAPKKVRRRRAKDPSKVKRRKSETDEAFEKRFALFTSDETEEHYQKKVAAAPRRTRREEYRAELYTKRRCYWGTWNALLRSVDQARSDVLTQRKKGLPADWQRPRFGDAQSLSAESGGFRIVERGKLWWVIDLRIGTATGKNAEWVRVRAKCGNWHHIPEGASITTAQLTRRKDGQRWSYSLSLTVDGAQKSAREVSNTGLVSFDWGHREHGHGRAKEGIRAFVWIGDDGQQGEVILPAECRRCLDEIDALKSRMDQAFDARRESMGLREKNRHTYRRRLLRSGVQTDEEGQWLTWEMRYERRVGRLRKRWQNLRKETYVQAVRALRSRYAQFAFESESNASLKRQQKDEQMLRRARANRDLTARYEFVSLCERFGAEIVPVSARNTTKECPSCGHLGDNTAELVTVCPACGTARDKDFGAAKVIFRRAEGALAKHAAE

SEQ ID NO: 509 - protein, 559 aa, Unknown; identical to SEQ ID NO: 507
  Description of Unknown: aquatic-non marine saline and alkaline-hypersaline mat sequence

SEQ ID NO: 510 - protein, 471 aa, Unknown; identical to SEQ ID NO: 508
  Description of Unknown: aquatic-non marine saline and alkaline-hypersaline mat sequence

SEQ ID NO: 511 - protein, 560 aa, Unknown; identical to SEQ ID NO: 504
  Description of Unknown: aquatic-non marine saline and alkaline-hypersaline mat sequence

SEQ ID NO: 512 - protein, 560 aa, Unknown; identical to SEQ ID NO: 504
  Description of Unknown: aquatic-non marine saline and alkaline-hypersaline mat sequence

SEQ ID NO: 513 - protein, 560 aa, Unknown; identical to SEQ ID NO: 504
  Description of Unknown: aquatic-non marine saline and alkaline-hypersaline mat sequence

SEQ ID NO: 514 - protein, 559 aa, Unknown; identical to SEQ ID NO: 507
  Description of Unknown: hypersaline lake metagenome sequence

SEQ ID NO: 515 - protein, 471 aa, Unknown; identical to SEQ ID NO: 508
  Description of Unknown: hypersaline lake metagenome sequence

SEQ ID NO: 516 - protein, 545 aa, Unknown
  Description of Unknown: solid waste-landfill-landfill leachate sequence
MKTLSRPAVIVDGIDDLGREYSSARWIYHRLLDFEDTHQSVLAAAAERAAPGITRVGRIVSRLSRRIRWSERSTGWSPPLHTPWLTSLRARLIELRAERNASDGWREAMCWADDSEPGAPARGGARRKAGETDEDFAARSAKRRTTLTRREAHRAALYAEHVAVGSSGRSRIHWGTWNGLVKSVDQARAAVLKARKQGLPAEWRRPRWSDDSTLFADTHGFRIVSKDDSGPWWTLELRTHFGWVRFRAKCGNWHEIPESASMRTLKLTRRQKTLGSSGRSTRKGWAYSVSIAIEGVEPAAHTGAGLVALDWGHREHGHPHESEGIRAFTWLGDDGALGEILLPRECREATDAVDEMKARVDGAFNARKSALGLPDRNRHRYRSRLMRAGVRTDEEQLWLTWEDRYEMRMQRARKRVKNLRQETYLKAVRMLRSRYSQFAIEDESIMRHRAADIDKETSHRKRSNRELTARYLFVSICERLGAEMIPVPARNSTRECPKCGHLDENTAELIIVCGGCGTARDKDHGAVQVILRRAKEALEKRLASP

SEQ ID NO: 517 - protein, 538 aa, Unknown
  Description of Unknown: solid waste-landfill-landfill leachate sequence
MKTLSRPAVVDRDTATRLDREYTAARWLHNRILDFEAEHQRVIDAAADTAAPGISRCARIVAKLRGRVRRRERSTGWSPPLHEEWRKILEARIAELRKARNADPAYQAALRWDRESAPGAVVKLPRRKAGETDEAFAARKAAGKTRSRREAWRTEVCYPQRRCFISSYNALCRIVDQARSAVLAERKAGRPAEWRRPRHSDPTATLHWEPGSWEIVDMGPVWWTIRLAVGYSDRQTKADHVTVRAKCGTWHDTTGREFATAKLTRIRDGRGYRYSLSLCVDVAAAPLPGDGVVGLDWGHREHGHPEQDEGIRAWSWHGDDGRSGVVILPAEIREQLDRVHELQSRIDTVWDARRREQKLPERSRQGYRTRLLREGAPTAEEAAWLDWETRYERRAQRSRQRVQALRRETYLRAVRELRQRYRVFAVEDQPGRAHRDLDTEEQTRRRKRENRDVVARYEFLSICERLGADVIPVPARDTTRECPDCGHLAERTSDLTIACVSCGRVRDRDAGAARVILRRGIEALANRAAKARNSEAAE

SEQ ID NO: 518 - protein, 524 aa, Unknown
  Description of Unknown: terrestrial-soil-agricultural soil sequence
MIFAIKRPGILESDPSALDTELRAARRTHHLLLDFEDKHQALLDEVAETVAPGIGRIARIVNKLISRKHRMERSTGWSPPLHDNWRLVLKDRLQSLRNQRNSDPRWKTALKWADMPGENAPPRGGARRKVGETDEAFAARVSSRRTVLTRREAYRAELYTGRTIYWGTWNGLLKQVDQARSMVVSQRAAGLPAEWHRPRWDKPTTLYADRGGFTVHRENKHWVVDIRLLKGSARFRLSTRGKISDNFTEFRTAKVTRFKNGAGWSYSVSLTVSSESSLPAVGAGVVAFDGGYRERGHDAEQQGIRALVWTGNDGKSGEVLLPLACRTLADQNKQLLSKLDTEFTQLNVPFRSRHHYRSALMRAGVRTELEHAWLGDERRIERRVAANRKRIENLRKETYLRVVKELLASYGTFVFEDTSGQALRDIGTDKQALRRSRQNRDMVAEYSFRKLIERRGGNVITVTARNSTRECPTCGYLCESTAQISIKCPACSTIRDQDFGASQVLLRRGLEALEKHNSNTRIAS

SEQ ID NO: 519 - protein, 558 aa, Unknown
  Description of Unknown: terrestrial-soil-agricultural soil sequence
MLVLHRPAKLESDERRLDQEYRSARWLHHRILDFEDEHQRVLDTVAEQIAPGVVRIGQILARLNGRARRAERSSKGVWCPNPHPDLAERLKARLQELRKVRDADPRWKAATKWPDEEIGEPKQVRRRRAKPASKIQRRKSESEEAFRKRFELLTQDESDEHYAQKLANARRDSRRDVHRKKLYAERRIYWGTWNSLCERVDAARQAVLKRRKQGLPAEWRRPRWDQSNTIAAPAAGFRIVEQGPLWWTAEMRLGTGDGNEAEWVRFRFKGGNWHKLGPEAKLVACELTRRRDGMRWNYSVSITVDGVTKASAPAATTRCVAFDWGHREHGHDRAREGIRAFVWVGDDGRSGEVLIPRECREAQDEIDALKSRVDTAFLARKQSLELLDHTRYSYRRRLTRSGCCTREESAWLRWEQRYERRIQKRRKRIDNLREETYLRTVQELRSHYAFFGFEDESGQGLRRKQADDQMARRKRANRDLATRFEFVSLCERFGAEVVTVPARNTTRECPSCGHVGENGPELVTVCQACGTARDKDFGAAMVILKRMQQALANRDAAA

SEQ ID NO: 520 - protein, 476 aa, Unknown
  Description of Unknown: wastewater-industrial wastewater-hydrocarbon resource environments sequence
MRVGRIVARLLRRSKRRARASIGTWTPDPRPALLVSLKARLDELREQRNADPRWREACRWADTPADDAPVRGEARRKASETDEDFAKRCEKRRDRLTRREAYRHALYEQRRCYWGTYNALCKCVDQARVSVIKARKAGLPAEWRRPRFPQSPQSIWADKGFRIVERGKLWWTLEMPLGVKPIQWVRFRAKCGNWHAIPEDAHLRMVQLRRERDGHRWRYSVSIVIAGIPERRHNGSGVVGLDWGHREHGHGLEREGIRAFTWIGDDGASGEILIPRECRDQLDRIDELKARADDAFNARGLPDRNRYSYRRRLMGLGVRTHEESLWLQWEMRYERRMASARKRWQALRQGVYLSAVRQLRQRYAVFAFEDETGRGHRKLDTEEQTRHRKRSNRDLTARYEFLQICERSGARVITVPARNSTRECPEPECGGLLPENGPELLVACPKCGRVRDKDYGAARVILRRALEALATEAQSA

SEQ ID NO: 521 - protein, 530 aa, Unknown
  Description of Unknown: wastewater-industrial wastewater-hydrocarbon resource environments sequence
MVTLALKRPAIVDATEALDAEYRSARWLHHRLLDFEDEHQRLLDCVANECAPGVVRVGRIVARLLRRSKRRARASIGTWTPDPRPALLVSLKARLDELREQRNADPRWREACRWADTPADDAPVRGEARRKASETDEDFAKRCEKRRDRLTRREAYRHALYEQRRCYWGTYNALCKCVDQARVSVIKARKAGLPAEWRRPRFPQSPQSIWADKGFRIVERGKLWWTLEMPLGVKPIQWVRFRAKCGNWHAIPEDAHLRMVQLRRERDGHRWRYSVSIVIAGIPERRHNGSGVVGLDWGHREHGHGLEREGIRAFTWIGDDGASGEILIPRECRDQLDRIDELKARADDAFNARGLPDRNRYSYRRRLMGLGVRTHEESLWLQWEMRYERRMASARKRWQALRQGVYLSAVRQLRQRYAVFAFEDETGRGHRKLDTEEQTRHRKRSNRDLTARYEFLQICERSGARVITVPARNSTRECPEPECGGLLPENGPELLVACPKCGRVRDKDYGAARVILRRALEALATEAQSA

SEQ ID NO: 522 - DNA, 36 bp, Artificial Sequence
  Description of Artificial Sequence: Synthetic oligonucleotide
ccagcaacagccgcgtggggctactagtactgcgac

SEQ ID NO: 523 - DNA, 36 bp, Artificial Sequence
  Description of Artificial Sequence: Synthetic oligonucleotide
ccaccaacagccgcgcagggcttcgaatactgcgac

SEQ ID NO: 524 - DNA, 36 bp, Artificial Sequence
  Description of Artificial Sequence: Synthetic oligonucleotide
ccaacaacagccgcgcagggcttcgagtactgcgac

SEQ ID NO: 525 - DNA, 36 bp, Artificial Sequence
  Description of Artificial Sequence: Synthetic oligonucleotide
ctcccaccagccgcgcagggctacgagtactgcgac

SEQ ID NO: 526 - DNA, 36 bp, Artificial Sequence
  Description of Artificial Sequence: Synthetic oligonucleotide
ccagcaacagccgcgtggggcttcaaatactgcgac

SEQ ID NO: 527 - DNA, 36 bp, Artificial Sequence
  Description of Artificial Sequence: Synthetic oligonucleotide
ccagcaacagccgcgtggggctgcaaatactgcgac

SEQ ID NO: 528 - DNA, 36 bp, Artificial Sequence
  Description of Artificial Sequence: Synthetic oligonucleotide
ctcgcacaccagccgctcagggcttcgtactgagac

SEQ ID NO: 529 - DNA, 36 bp, Artificial Sequence
  Description of Artificial Sequence: Synthetic oligonucleotide
ccaacaacagccgcgcggggctgcgaatactgcgac

SEQ ID NO: 530 - DNA, 34 bp, Artificial Sequence
  Description of Artificial Sequence: Synthetic oligonucleotide
cttccaacagccgtgcagggcttcgaatgctgca

SEQ ID NO: 531 - DNA, 37 bp, Artificial Sequence
  Description of Artificial Sequence: Synthetic oligonucleotide
ccaccaacagccgccgagggcttcaaattctcggacg

SEQ ID NO: 532 - DNA, 37 bp, Artificial Sequence
  Description of Artificial Sequence: Synthetic oligonucleotide
gatcacaacagccgcgagaggcttcgaatatctcgac

SEQ ID NO: 533 - DNA, 1136 bp, Unknown
  Description of Unknown: hypersaline lake metagenome sequence
gccgacatcgccgacacggcctacctcatgctgaggcctttgacgggcaagcgcgcccgcacgatcgacgaggagaacgcgcagccgggccgcatggacccccgcaacatcggcaacgtcgtcgccgaggggcagagcaagaacctatgagctgctgctgctccgatgagatctgcccggtctgggaggaaaccaccccccgggcccgaagagcctacacgtgctgcgagtgcagcggccccattcgcgtgggggaacgtcaccacaagatctcttcccttttcgatgggtcgtggagcacatcgcgttcgcacgagcgctgtcatgccatcagcagcctgctgcaggcggactgcgacgtgtactgcgtagggatgcttcgtgagtgcctccatgcgcagtcggccgggcaccttccggaggaccttcggccttacgccaaggggctcatgttcaagttctcggagcactactacgagcaccaagcgcgactgctgtcgaaacgtcgctacggggcccaggccgtatcctcaaggtcggtttcatgaggcagactctgacgctgtgccggccagccaggttgatctccagcgaagtgcggctggaccaggagtaccgggcagcccgctgggctcaccaccgcctgctggacttcgaggacgagcaccagcgacacctcaatcaggtggcagaatgcccatcgtgtggtcaccttggtgataatacgtcggaattggtgacggtgtgtccggcttgcggcaccgccagggacaaggacgttggcgcggccgaggtgatccttcggcgcgcagaggaggcgctcgcaaagcattctgcagagtagcgaaatcaaaggggtcgcgaggcgtcccctcaagggacaccgcaccaacagccgcgtggggcttccaatacctcgacagtcgccccaccgctcgacgtgcgaaccccaccgcttctgcgactcgccccctcaccctagcccttcacgctgcccctctcatgctgccaacaagctcttcgaagctctgtcgctccagcgcctcctcgtcaggccggtcgcggtcgtcgaccacggcgtcgatgatacgttgtttggcggccaacacgcgcccgatgtgctcgtcgatggtgtc

SEQ ID NO: 534 - DNA, 307 bp, Unknown
  Description of Unknown: solid waste-landfill-landfill leachate sequence
gagtgaagacactatccagaccagcggtcgtagaccgcgatacagcgaccaggctcgaccgtgagtacacggcggcacgatggctgcacaaccgcatcctcgacttcgaggcggagcaccagcgggtgatcgatgccgcggcagacaccgctgagaggactagcgatctaaccatagcgtgcgtatcatgtggacgtgtacgcgaccgtgatgcgggggctgcccgcgtcatcctacggcgcggaatcgaggcgctcgcaaaccgtgccgcaaaggcgcggaacagcgaggcagcagagtgaacaaa

SEQ ID NO: 535 - DNA, 30 bp, Artificial Sequence
  Description of Artificial Sequence: Synthetic oligonucleotide
caacagccgcgtggggctactagtactgcg

SEQ ID NO: 536 - DNA, 67 bp, Artificial Sequence
  Description of Artificial Sequence: Synthetic oligonucleotide
gaattggtgacggtgtgtccggcttgcggcaccgccagggacaaggacgttggcgcggccgaggtga

SEQ ID NO: 537 - DNA, 73 bp, Artificial Sequence
  Description of Artificial Sequence: Synthetic oligonucleotide
gacaccgcaccaacagccgcgtggggcttccaatacctcgacagtcgccccaccgctcgacgtgcgaacccca

SEQ ID NO: 538 - DNA, 94 bp, Artificial Sequence
  Description of Artificial Sequence: Synthetic oligonucleotide
caccgccagggacaaggacgttggcgcggccgaggtgatccttcggcgcgcagaggaggcgctcgcaaagcattctgcagagtagcgaaatcaa

SEQ ID NO: 539 - DNA, 36 bp, Artificial Sequence
  Description of Artificial Sequence: Synthetic oligonucleotide
gtcgcagtactagtagccccacgcggctgttgctgg

SEQ ID NO: 540 - DNA, 36 bp, Artificial Sequence
  Description of Artificial Sequence: Synthetic oligonucleotide
gtcgcagtattcgaagccctgcgcggctgttggtgg

SEQ ID NO: 541 - DNA, 36 bp, Artificial Sequence
  Description of Artificial Sequence: Synthetic oligonucleotide
gtcgcagtactcgaagccctgcgcggctgttgttgg

SEQ ID NO: 542 - DNA, 36 bp, Artificial Sequence; identical to SEQ ID NO: 541
  Description of Artificial Sequence: Synthetic oligonucleotide

SEQ ID NO: 543 - DNA, 36 bp, Artificial Sequence
  Description of Artificial Sequence: Synthetic oligonucleotide
gtcgcagtatttgaagccccacgcggctgttgctgg

SEQ ID NO: 544 - DNA, 36 bp, Artificial Sequence
  Description of Artificial Sequence: Synthetic oligonucleotide
gtcgcagtatttgcagccccacgcggctgttgctgg

SEQ ID NO: 545 - DNA, 36 bp, Artificial Sequence
  Description of Artificial Sequence: Synthetic oligonucleotide
gtctcagtacgaagccctgagcggctggtgtgcgag

SEQ ID NO: 546 - DNA, 36 bp, Artificial Sequence
  Description of Artificial Sequence: Synthetic oligonucleotide
gtcgcagtattcgcagccccgcgcggctgttgttgg

SEQ ID NO: 547 - DNA, 34 bp, Artificial Sequence
  Description of Artificial Sequence: Synthetic oligonucleotide
tgcagcattcgaagccctgcacggctgttggaag

SEQ ID NO: 548 - DNA, 37 bp, Artificial Sequence
  Description of Artificial Sequence: Synthetic oligonucleotide
cgtccgagaatttgaagccctcggcggctgttggtgg

SEQ ID NO: 549 - DNA, 37 bp, Artificial Sequence
  Description of Artificial Sequence: Synthetic oligonucleotide
gtcgagatattcgaagcctctcgcggctgttgtgatc

SEQ ID NO: 550-600 - skipped (51 entries)

SEQ ID NO: 601 - protein, 623 aa, Unknown
  Description of Unknown: aquatic-freshwater sequence
MKTIKIKIKLTTDQVQLCDRYLEELTWLWNLTLSNQLHNHCVTWYDWAAKLSANLDKATEKLDKLKPEQQQLIKDYYRTKDKPKLSKKEQELVAKFDIFARWNSFSLDGIIPVPLRLGNSGYEGLSCQIATGGNYWKRDENINIPINTKKGIVHVKGYKLVKGDKPWQRIEIVPHKYRTFPGGKFEGRELTTLEKLDNVNGLNTLRAFQNLPDLQVSSHYIGGLLAFFKESWSAFLDPKRMNSRKPKFKKDSDKITTLSNNQCAPNRIDVNKNIVTVTGFSPIAIIDKNWVKRLNLSEVLPRTYMLTQNPSGYYINIVIAHPLHEEKTALVKKLPKVKKEFGEDSQEYEDIKSKIKFLEQQIKEASIVKGKDLSVGIDPGVQAVVSTDHGALFLPNLTRERVSIHIEELQSRLDNIELINDKKWKSLGNKTPRIKTKNETKLQEKISRLHERGANSSNAFNHKLSTRLSRTYEHIAWEDTQINNLLKQVEPKALPEGIGYAHNGASAKRGLNWIMRQRCLSDLKAKTKQKTENRGGNFHEPPANYSSQTCHCCKQKGERRSQHEFICKNSDCKLFDIPQQADTNAARNHKQNGGFELGEVKYHNVKLVYQKPKRFKKKRLTNQ

SEQ ID NO: 602 - protein, 466 aa, Aphanizomenon phage vB_AphaS-CL131
MKTKTIEFKIYPTLAQSQTIDKWLQDIKWVWNKGLSLKFADRQKHYRTQIGDRNIPDGLPLRWKWRKVEATDKKGKITEKWEKIRLVGGGVVRPKSGYPYCPIREHRNIEDPGKFKYFRNDNSPQFVIDIPSEFKEGMADTLKKAWQAYSDPKRPTQKPKFKGKQDKVRSLTSLHAGGKSKLLKPERIPGSDNGFVQFPKLGKLKVKGLYSRHDWVEWGSAKIVKEPSGYYLHVCVDVPNDPLPKSDKSVGIDPGLLSVITTDQGREVAPPKLFRKQQTKLRRLQRKASRQQKGGSNQKKTYQKVALQHEKIRRSRNAFNHKLSTKVVREYSGIVMEDLKIQNLSRKPKAKKREDGNGYEQNGAKRKAGLNKSFADSALGDLISKIETKCKDTDREFVKVAAHHTTVDCSNCGAKIKKALSQRTHRCTECGYEDGRDSNAAKNILIKGQKEFKTVYRAWAWEHGET

SEQ ID NO: 603 - protein, 505 aa, Unknown
  Description of Unknown: aquatic metagenome sequence
MKTLEFKLTLNQSQRAKLNDWMSANKYVWNEGVRHIEWFNEFNRYHKPDKKSYPCSPIRSQNFWKKYRGQEPIENYGLGEFPSCPIGWINDSFNPELPSFPVSRSPEHEQIHNISLFSFIKLFAHSRNQDKPWLLEVPSKFINGEVDCLINSWNAFVKSPANLKRRPPKYKGKHDKIDALIHNNSKGMGTKGDSINVPKLGYVRVKGFSDRWYFEDGKPIDFCPLKICKKASGWYLLITGNTPDRHYQKSDSIAGFDLGVHEILTDEKNYHATSPRYLKNSQASLKRLQRKMSRQFRMNEGDKTWERKNWNRTKLKLARTHERIARQRRALNHFLSHKVVNTHAVIALEDLKLLNMTKAVKTGEAGVQNGRKSKSGLNRAMLDNGLGQLVGMIETKAKVADRIVVQVDPKHTSQECPHCGHIEKKANKKNREVTCGNCGASFHRDTSAAEIIKRRGIARLEGGNVESKAKKERKAKYGKRSKVVESAIDPRTIFVEALQDLPLFG

SEQ ID NO: 604 - protein, 505 aa, Unknown; identical to SEQ ID NO: 603
  Description of Unknown: aquatic metagenome sequence

SEQ ID NO: 605 - protein, 505 aa, Unknown
  Description of Unknown: aquatic metagenome sequence
MKTLEFKLTLNQSQRAKLNDWMSANKYVWNEGVRHIEWFNEFNRYHKPDKKSYPCSPIRSQNFWKKYRGQEPIENYGLGEFPSCPIGWINDSFNPELPSFPVSRSPEHEQIHNISLFSFIKLFAHSRNQDKPWLLEVPSKFINGEVDCLINSWNAFVKSPANLKRRPPKYKGKHDKIDALIHNNSKGMGTKGDSINVPKLGYVRVKGFSDRWYFEDGKPIDFCPLKICKKASGWYLLITGNIPDRHYQKSDSIAGFDLGVHEILTDEKNYHATSPRYLKNSQASLKRLQRKMSRQFRMNEGDKTWERKNWNRTKLKLARTHERIARQRRALNHFLSHKVVNTHAVIALEDLKLLNMTKAVKTGEAGVQNGRKSKSGLNRAMLDNGLGQLVGMIETKAKVADRIVVQVDPKHTSQECPHCGHIEKKANKKNREVTCGNCGASFHRDTSAAEIIKRRGIARLEGGNVESKAKKERKAKYGKRSKVVESAIDPRTIFVEALQDLPLFG

SEQ ID NO: 606 - protein, 505 aa, Unknown; identical to SEQ ID NO: 603
  Description of Unknown: aquatic metagenome sequence

SEQ ID NO: 607 - protein, 505 aa, Unknown; identical to SEQ ID NO: 603
  Description of Unknown: aquatic metagenome sequence

SEQ ID NO: 608 - protein, 560 aa, Unknown
  Description of Unknown: aquatic metagenome sequence
MSNVSENVRTKEFKLILTPEQERTLEDWMLVCKWVWNRSLGLIEEFNDWNPYDKISKSYVPAMPLQRYDRKLKQFVRVEIPDWKLSTERKETSKGLVHPVSIDKDTPQIDSLNSKKSILYGFLKVFGHQYHKDRIITYMVRGQERKVKFTDCPAKFIQGVSHELSKAWDGFLAGRHSRPRFKTARDKVMTLLHYNAKDIGVKGSSINIPKLGYVEVIGFDNRWYGVDFNPMKICKKASGWYVQFTATVPVKKFKKTGLACGIDPGHQFVMALDNGHTIKAAQPLKQNLRRLKRMQKRLSRKFRINNGKTKNWEKLNQRIAKLHEKIARHRRSFNHWHSTNLVKWFDVIFVEDYKPANVYRKAKAKTKTDEQGNPMTADNGAVVYEKNNQKRKKGSNRTGSDIAIGQAIELLETKAKEHDKLVIRVPAYGTTLRCANCGHEERKSLSQRIHHCANCGYTVARDVNSGQNVKLKGLAQLALDHGVELVDNFWYQILKNATTSSCSEKKGKKKAKKKDVVSIPDDLFKNGVSAFLIAETVKTRAIIKQKYLENLNKTAKTLMG

SEQ ID NO: 609 - protein, 522 aa, Unknown
  Description of Unknown: aquatic metagenome sequence
MDPSIKVRKVEFKVPLDTQQRQIFEHHSQALRFIWNTGLACIQWREWWEKWQQVLESPEYQGYAPEPVEMDWGYNLIGKKKVYGLCCDRVRFRIEKEDPVLDVGEWIDGTKLGSGKSIAGYWVAYPCKPDSVREHWTEQPRLPLLMKNPYMALRSMFAKKNWDPDSVEGKIIHSLNTAWVAGELKALGDAWSSYKSGVRKRPRFKKRHDRSNLINPSSKQTKFCKNSLTLPGMGRVTVKGLQKRWGNKPACPISLIKEGDEFYLQLSGGVEVPATRSNGVTIGIDPGSVRLATDDSGRAIDAPKFGKRAMRRAQKLQAAINRKLRLNSDRVYDDADPSKFYLKPRRDWKRKNLQKVRTKLQRLSAKTARQRRAFNHFHSTRLVQSADVIIMEGIELKNVTRAVKKGKSGEHNKRKAKAGLNRSLLDNAIGQFYGMVEQKAKDAGKVTARVNPFRTSMTCHQCGFSDAKNRKTQAVFHCQKCGHHDNADRNAAANIKRMGILGITKLTFDNEWNITVPDWDKI

SEQ ID NO: 610 - protein, 553 aa, Unknown
  Description of Unknown: aquatic metagenome sequence
MNTITKTRKVEFKVTLDTQQRQVFDHHSHALRFVWNTGLACIQWREWWEKWQQVLESPDRVGYAPEPVEMEWAYNLVGKKKVYGLACDRVRFRLEKSDPTLANGEWVANGKKEGGYWVAYPCKPQPVREHWTEEPRLMLLMKNPYMALRTMFAKKNWDPDSVQGKIIHSLNTAWVAGELKALGDAWSSYKSGVRKRPRFKKRHDRSNLINPSSKQTKFSGNSLTLPGMGRVTVKGLQQRWGDKPACPIALIKEGDEFYLQLTGEVQVPAVRSNGVTIGLDPGSVRLATADNGSAIEAPKFGRNIMRRNKKLQASINRKLRLNSDRVHDEADPSKFYLKPRKNWKRKNLQKVRTKLQRLNTKAARQRRAYNHFHSTRIVQSADVIIMEGLELKNVTRAVKKGKSGQHNKRKAKAGLNRSLLDNAIGQFYGMVEQKAKDAGKVTTRVNPFRTSMTCHQCGFSDAKNRTTQAVFHCQKCGHRDNADRNAALNIKRMGVLGVTKLTFDNDWNITIEGWGSVAALHSKGLKPVGTDKKRSKRVQKEHPSQMVLELGAP

SEQ ID NO: 611 - protein, 633 aa, Unknown
  Description of Unknown: aquatic metagenome sequence
MTRENKQAVNNMKTIKIKVKLTPSQIESCNKYLEELSWLWNLVLANQLHNHCIRWYEWAAKLSAELAKTNEKLEKLKPEQQQLIKDYYNSTTKPKLSKKDQELVNKFNILSRWSPFDLEGIIPVPLRIGNSAYEGLSCQIATGGSYWKRDDNTVIPVNTKKGIAFIKGSKLVKGDRPWQRIEIKPHEYRKFPGGKYEGRELVTLEKFDNLNGLNTLRASQNLPDLTVSSHYIGGLLGFFKESWKAFLDSKRTISRKPKFKKDNDKIATLSNSQCPPNRIDVDKNIIAITGFSAVKVDDKSWVKRLNLSQSLPRTYMLTKQQSGYYINIIVAHPLQEEKSILANKLPKVKKQFGEDSQEYADIKSKLKFIEQQIKESSVIEGKGLSVGIDPGIQSVVSTDHGALFLPNLSRERISIHIEELQSKLDNAESINDKKWKEAGNKTPRPRTNAEIKLQDKIRRLHERGSNSSNAFNHKLSTRLSRTYEHIAWENTQIKNLLKQVEPKSLPEGTGYAHNGASAKRGLNWIMRQRCLGDLEKKTKLKVENRGGSFQQPPANYTSQTCHQCKQKGERLSQHEFICKNSECRLFNVPQQADTNAARNHKQNAGFELGEVKYNSVRLTYEKPQRFKKKRADN

SEQ ID NO: 612 - protein, 622 aa, Unknown
  Description of Unknown: aquatic metagenome sequence
MKTIKIKVKLTPSQIESCNKYLEELSWLWNLVLANQLHNHCIRWYEWAAKLSAELAKTNEKLEKLKPEQQQLIKDYYNSTTKPKLSKKDQELVNKFNILSRWSPFDLEGIIPVPLRIGNSAYEGLSCQIATGGSYWKRDDNTVIPVNTKKGIAFIKGSKLVKGDRPWQRIEIKPHEYRKFPGGKYEGRELVTLEKFDNLNGLNTLRASQNLPDLTVSSHYIGGLLGFFKESWKAFLDSKRTISRKPKFKKDNDKIATLSNSQCPPNRIDVDKNIIAITGFSAVKVDDKSWVKRLNLSQSLPRTYMLTKQQSGYYINIIVAHPLQEEKSILANKLPKVKKQFGEDSQEYADIKSKLKFIEQQIKESSVIEGKGLSVGIDPGIQSVVSTDHGALFLPNLSRERISIHIEELQSKLDNAESINDKKWKEAGNKTPRPRTNAEIKLQDKIRRLHERGSNSSNAFNHKLSTRLSRTYEHIAWENTQIKNLLKQVEPKSLPEGTGYAHNGASAKRGLNWIMRQRCLGDLEKKTKLKVENRGGSFQQPPANYTSQTCHQCKQKGERLSQHEFICKNSECRLFNVPQQADTNAARNHKQNAGFELGEVKYNSVRLTYEKPQRFKKKRADN

SEQ ID NO: 613 - protein, 622 aa, Unknown
  Description of Unknown: aquatic metagenome sequence
MKTIKIKVKLTPSQIESCDKYLEELSWLWNLVLANQLHNHCIRWYEWAAKLSAELAKTNEKLEKLKPEQQQLIRDYYNSTTKPKLSKKDQELVNKFNILSRWSPFDLEGIIPVPLRIGNSAYEGLSCQIATGGSYWKRDDNTVIPVNTKKGISFIKGSKLVKGDKPWQRVEIKPHEYRKFPGGKYEGRELVTLEKFDNLNGLNTLRASQNLPDLTVSSHYIGGLLGFFKESWKAFLDSKRTISRKPKFKKDNDKIATLSNSQCPPNRIDVDKNIIAITGFSAVKVDDKSWVKRLNLSQSLPRTYMLTKQQSGYYINIIVAHPLQEEKSILANKLPKVKKQFGEDSQEYADIKSKLKFIEQQIKESSVIEGKGLSVGIDPGIQSVVSTDHGALFLPNLSRERVSIHIEELQSKLDNAESINDKKWKEAGNKTSRPRTNTEIKLQDKIRRLHERGSNSSNAFNHKLSTRLSRTYEHIAWENTQIKNLLKQVEPKSLPEGTGYAHNGASAKRGLNWIMRQRCLGDLEKKTKLKVENRGGSFQQPPANYTSQTCHQCKQKGERLSQHEFICKNSECRLFNVPQQADTNAARNHKQNAGFELGEVKYNGVRLTYEKPQRFKKKRADN

SEQ ID NO: 614 - protein, 557 aa, Unknown
  Description of Unknown: aquatic-freshwater sequence
MSNFSENVRTKEFKLILSSEQERTLEDWMLVCKWVWNRSLGLIEEFNEWNPYDKLSKSNVPATPLQRYDRKLKQWVRIEIPDWKMGIERVEKKRGLIHPVAIDENSPIIDSLDSKKSVLYGFLKVFGHQHHKDRIVTYLVRGEERKVNFTDCPAKFIQGVAHELSKAWEGFLAGRHSRPRFKTAKDKVMTLIHYNAKDLGVKDSKVNIPKLGYIEVIGFDKRWYGCDFNPMKICKKASGWYIQLTASVPVKQAKKTGLCCGIDPGHQFVMALDNGHTIEAAQPLKRSLKRLRKMQQQLSRKYRMNEGKTKNWEKLNNKIAKLHEKIARHRRSFNHWHSTNLINWFDVIFVEDYKPANVYRKAKAKAKLDTEGNPVVAENGTVIYDKNSQKRKRGSNRTGSDVAIGQAIDLLETKAKEHGKLVIRVDNWGTTLCCAKCGHQEKKKLSQRTHKCSNCGYTVARDVNSGQNIKLKGLAQMAINQGVELSDNFWYKFLINKNSATPSCSKKATKKKTKKSDTITIPDDLFKNGVHDFLVAETAKTHAIINRMSLGDFDRNA

SEQ ID NO: 615 - protein, 506 aa, Unknown
  Description of Unknown: aquatic-freshwater sequence
MGNSGYEGLSCQIATGGNYWKRDENINIPINTKKGIIHVKGYKLVKGDKLWQRIEIVPHKYRTFPGGKFEGRELTTLEKLDNVNGLNTLRAFQNLPDLQVSSHYIGGLLAFFKESWSAFLDPKRMNSRKPKFKKDSDKITTLSNNQCAPNRIDVNKNIVTVTGFSPITIIDKNWVKRLNLSQVLPRTYMLTQNPSGYYINIVIAHPLHEEKIALVKKLPKVKKEFGEDSQEYEDIKSKIKFLEQQIKESSIVKGKDLSVGIDPGVQAVVSTDHGALFLPNLTRERVSIHIEELQSRLDNAELINDKKWKSLGNKTPRIKTKNETKLQEKISRLHERGANSSNAFNHKLSTRLSRTYEHIAWEDTQINNLLKQVEPKALPEGVGYAHNGASAKRGLNWIMRQRCLSDLKAKTKQKTENRGGNFHEPPANYSSQTCHCCGQKGERRSQHEFVCKNSDCKLFDIPQQADTNAARNHKQNGGFELGEVKYHNVKLVYQKPKRFKKKRLTK

SEQ ID NO: 616 - protein, 557 aa, Unknown
  Description of Unknown: aquatic-freshwater sequence
MSNFSENVRTKEFKLILSSEQERTIEDWMLVCKWVWNRSLGLIEEFNEWNPYDKLSKSNVPATPLQRYDRKLKQWVRIEIPDWKMGIERVEKKRGLIHPVAIDENSPIIDSLDSKKSVLYGFLKVFGHQHHKDRIVTYLVRGEERKVNFTDCPAKFIQGVAHELSKAWEGFLAGRHSRPRFKTAKDKVMTLIHYNAKDLGVKDSKVNIPKLGYIEVIGFDKRWYGCDFNPMKICKKASGWYIQLTASVPVKQAKKTGLCCGIDPGHQFVMALDNGHTIEAAQPLKRSLKRLRKMQQQLSRKYRMNEGKTKNWEKLNNKIAKLHEKIARHRRSFNHWHSTNLINWFDVIFVEDYKPANVYRKAKAKAKLDTEGNPVVAENGTVIYDKNSQKRKRGSNRTGSDVAIGQAIDLLETKAKEHGKLVIRVDNWGTTLCCAKCGHQEKKKLSQRTHKCSNCGYTVARDVNSGQNIKLKGLAQMAINQGVELSDNFWYKFLINKNSATPSCSKKATKKKTKKSDTITIPDDLFKNGVHDFLVAETAKTHAIINRMSLGDFDRNA

SEQ ID NO: 617 - protein, 506 aa, Unknown; identical to SEQ ID NO: 615
  Description of Unknown: aquatic-freshwater sequence

SEQ ID NO: 618 - protein, 557 aa, Unknown
  Description of Unknown: aquatic-freshwater sequence
MSNFSENVRTKEFKLILSSEQERTLEDWMLVCKWVWNRSLGLIEEFNEWNPYDKLSKSNVPATPLQRYDRKLKQWVRIEIPDWKMGIERVEKKRGLIHPVAIDENSPIIDSLDSKKSVLYGFLKVFGHQHHKDRIVTYLVRGEERKVNFTDCPAKFIQGVAHELSKAWEGFLAGRHSRPRFKTAKDKVMTLIHYNAKDLGVKDSKINIPKLGYIEVIGFDKRWYGCDFNPMKICKKASGWYIQLTASVPIKQAKKTGLCCGIDPGHQFVMALDNGHTIEAAQPLKRSLKRLRKMQQQLSRKYRMNEGKTKNWEKLNNKIAKLHEKIARHRRSFNHWHSTNLINWFDVIFVEDYKPANVYRKAKAKAKLDTEGNPVVAENGTVIYDKNSQKRKRGSNRTGSDVAIGQAIDLLETKAKEHGKLVIRVDNWGTTLCCAKCGHQEKKKLSQRTHKCSNCGYTVARDVNSGQNIKLKGLAQMAINQGVELSDNFWYKFLINKNSATPSCSKKATKKKTKKSDTITIPDDLFKNGVHDFLVAETAKTHAIINRMSLGDFDRNA

SEQ ID NO: 619 - protein, 391 aa, Unknown
  Description of Unknown: aquatic-freshwater sequence
MIFEPNVKVLEFKIHPTEEQVSKIDQSLAACKLLWNLSIALKEESKQRYYRKKHKFDEFSPEIWELSYSGHYDEKEFKSLKDKEKKLLIGNPCCKIAYFKKTSNGKEYTPLDAIPIRRFMNAENIDKDAVNYLNRKKLAFYFRENTAKFIGEIETEFKKGFFKSVIKPAYDAAKKGIRGIPRFKGRRDKVETLVNGQPGTIKIKSNGVIVSSKIGLLKVRGLDRLQGKAPRMAKITRKATGYYLQLTVETDDTIYKESDKCVGLDMGAVAIFTDDLGRQSEAKRYAKIQKKRLDRLQRQASRQKDGSNNQRKTYAKLARVHEKIARQRKGRNAQLAHKITSEYQSVILEDLKLKNMTAAAKPKEREDGDGYKQNGKKRKSGLNKALLEMSV

SEQ ID NO: 620 - protein, 559 aa, Unknown
  Description of Unknown: aquatic-freshwater-freshwater lake sequence
MIQANIEDKMTQENITRVIKFRLTLTEEQRLLIDEKMRLLKYLWNLAVSLQEEVNQRRLRDKFGFKEFSPEFWELSYLKLYSGFSHIEKLPKDKLRLLTGNPCCKIAYLKNKKEYVSLKLEERKKRPYLGNPDAKKHTTKPPDKKDLKKYFYPDLADKIFEIGSEFRGCFYRYVISKAFETAKKGIRGFPKYKGKLDSVESLIVGHPTLIKIRDGEIFLNKQIGLLVIDDINRLPKDADVRMASIVRKASGYYLHLTVNLPVPMHLPSDRQIGIDVGCVNLYTDSEGRHIETKAYYRNKERKIAHLQRKMARQEKGSANYLKSKEKLALLHEQIKDRRAGYLHQVSHKLTQKYSHIAMEDLKLKNMTKRANVKENEDGTYAHNGASAKSGLNKSILDQGIGELKRQLLYKSQEKGGQVVLVNPKFTSQTCFECGHKHKDNRKSQSEFICVSCGHSANADENAAKNILTLSLISSTIGVLRSSLFSYPSLLGKAVSLLAYVCGSPKGTCEAERERSDPPIDPPAKGGNCLDNFSTLTIKDPRHQLEKASQPIDSVQLTLF

SEQ ID NO: 621 - protein, 557 aa, Unknown
  Description of Unknown: aquatic-freshwater-freshwater lake sediment sequence
MSNFSENVRTKEFKLILSSEQERTLEDWMLVCKWVWNRSLGLIEEFNEWNPYDKLSKSNVPATPLQRYDRKLKQWVRIEIPDWKMGIERVEKKRGLIHPVAIDENSPIIDSLDSKKSVLYGFLKVFGHQHHKDRIVTYLVRGEERKVNFTDCPAKFIQGVAHELSKAWEGFLAGRHSRPRFKTAKDKVMTLIHYNAKDLGVKDSKINIPKLGYIEVIGFDKRWYGCDFNPMKICKKASGWYVQLTASVPVKQAKKTGLCCGIDPGHQFVMALDNGHTIEAAQPLKRSLKRLRKMQQQLSRKYRMNEGKTKNWEKLNNKIAKLHEKIARHRRSFNHWHSTNLINWFDVIFVEDYKPANVYRKAKAKAKLDTEGNPVVAENGTVIYDKNNQKRKRGSNRTGSDVAIGQAIDLLETKAKEHGKLVIRVDNWGTTLCCAKCGHQEKKKLSQRTHKCSNCGYTVARDVNSGQNIKLKGLAQMAINQGVELSDNFWYKFLINKNSATPSSSKKATKKKTKKSDTITIPDDLFKNGVHDFLVAETAKTHAIINRMSLGDFDRNA

SEQ ID NO: 622 - protein, 504 aa, Unknown
  Description of Unknown: aquatic-freshwater-freshwater microbial mat sequence
MKTAEFKLNLNNAQKAELNDWMSALKWVWNEGVRMIDYFNQFNAYHKPDKRSYPCSPILGVNHKRRYKKGFNGCTKSGDRPMGIYPSCPIGWIADSFNPEEPAYAVSQKADSIQVKNLSFFSLQKLFTHSRNQDRPWLISVPSKFIDGETQSLVNSWEAFKSGVANRKPPKYKGKRDKIESLIHNNSKGMGVKGDSINIPKIGYVRVKGFSDRWLFEDGKPIDFCPMKICKKASGWYLQITGHLPDRKYKKTSSIAGFDVGVHEIVTDDIALSVKSPRWLKTNGAKLKKLQRKVSRQWRMNENNDAWERKNWQKTQNKIARLHEKIARQRRAFNHYLSHKIVNTHQVIALEDLKLLNMTKAVKTGEAGVANGRKAKSGLNRAMLDVGIGQLVSMIETKAKVAGRDVVFVDPKHTSQICPECGHVEKKKNRKNRNVKCSNCGAEFHRDRSAAIEIKKRAVTKMSIPKEVKKERKPRGVGAFAAKKKAKDSRPIFDPSLIDLPLFG

SEQ ID NO: 623 - protein, 585 aa, Unknown
  Description of Unknown: aquatic-freshwater-glacier valley sequence
MLTLEFSVQLTEEQKTIAGEWMDSLKHQWNLGLSALEEFDRFSWYNKHDKKPALCCPIAEGEWIKEEKRVASTCSLIRDPAPKLTSSALQTGGDSLGTMARSDRLPEFLQQVPSKFRMGMLALLSVSWDAYIKDRKNKGKPKYKRRRDRWDVLYSGNLKDGLSCNGDILKGIPKLGTVVVPKLNQRWKTPTGETPPICAFKLLRDGDKFKVQLTGELQRSYKAKPSDLAVGIDLGFVYSHILSDGERSPLLSKSESKLENRKQLLQSQLDAKIDQRLTLWLHHPDTGFEQCRELIRVSVETWEKIRECRVAGEVAQIIGQKRDKRYMSLRHKLPKSKAEKQLRHQIKNLDRKLADTRKSKDEKLATRLVKKFGHVAIENGLQRQELRERPDPVPNESNGHDPNGANAQSEVNKQLKALAPGRKISIIEQRAKRYGRSFVKAESQFTTQECPVCGSLNQPSLKIEETGDRAYHCNNCGWHCDQDLNAAINIELRSFAFVPQVVLTLMAERARVMSYQKEGDGKIPVNPSWRGKRSAIEGETDSRTKKSKGSSDSGGRKGKEGAKLKAASRKSQSKAIPKKGSEVLQ

SEQ ID NO: 624 - protein, 507 aa, Unknown
  Description of Unknown: aquatic-freshwater-lake sequence
MKTLEFKLTLNRSQKARLNDWMTANKWVWNEAVRHIEWFNEFNKYHKPDKKNYPCSPIRSQNFWKKFRGQEPLENYGLGEFPSCPIGWINDSFDPELPSFPVSRSPKHEQIHNISLFSFIKLFAHSRNQDKPWLLEVPSKFINGEVDCLINSWNAFVKSPANLKRRPPKYKGKHDKIDALIHNNSKGIGTKGDSINIPKLGYVRVKGFTDRWLFADGKPIDFCPLKICKKASGWYLQISGEVPDRKYRKSESMAGFDLGVHEILTDEKNYHATSPRYLKTSQDKLKRLQRKMSRQFRMNEKDKTWERKNWDKTKIKLAKAHEKVARQRRTLNHYLSHKAVNTHAVIALEDLKLLNMTKSVKTGEAGVQNGRKAKAGLNRAMLDNGLGQLVGMIETKAKVADRIVVKVDPKNTSQECPHCGHIEKKANKKNRYVTCSNCGASFHRDTSAAEIIKRRGIARLDGSDTEPKVKKERKPKYGKRSKPVEPVEAPRPIVDKDLQHLPLFCCA

SEQ ID NO: 625 - protein, 624 aa, Unknown
  Description of Unknown: aquatic-freshwater-lake sequence
MKTIKIKIKLSSEQAAVCDRYLDELTWLWNLALSNQLHNHCVDWYAWAAKRSADLTKATEKLEKLKPEQQQLVKDYYSTKDKPKLSKKEQELVSKKEFEIFTRWSPFSLEGIIPVPLRLGNSAYEGLSCQIATGGNYWKRDENINIPVNTKKGVIYVKGYKLVKGDKPWQRIEIVPHKYRTFPSGKYEGRELTTLEKLDNVTGLNTLRAFQNLPDLQVSSHYIGGLLAFFKESWKAFLDPKRINSRKPKFKKDVDKIATLSNNQCAPNRIDIDKNIVTVTGLTPITIADKNWVKRLNLSQVLPRTYMITKQQSGYYINIVVAHPLQEEKSVLTNKLPKVKKEFGEDSEEYQDIKSKLKFIEQQIKQSSVLKGKNLSAGIDPGVQAVVSTDHGALFLPNLTRERISIHIEELQSRLDNAELINDKKWKSLGNKTSRIKTKNESKLQQKISRLHERGANSSNAFNHKLSTRLSRTYEHISWEDTQVTNLLKQVDPKALPEGVGYAHNGASAKRGLNWIMRQRCLGDLKAKTKQKTENRGGNFHEPPANYSSQICHCCGQKGERRSQYEFVCKNPDCKLFDVAQQADTNAARNHKQNGGFELGEVKYHNVRLVYQKPKRFKKKRLTK

SEQ ID NO: 626 - protein, 484 aa, Unknown
  Description of Unknown: aquatic-marine sequence
MKTLEFKLDLTQEQQALINQWLADLKWVWNRGLRLLEEDQQRRWRDKHGHLLPDSLKLQWRNGQPTGSGVRKTRDGYKYCAIRQDRDVEDVRKFFSSDSYHNKKNTPQWLHDVPAKFRVGVSAQLKQAWKSYQDPKHPAKRPRYKGKRDCLRSLVNRNAGGKNKELNPEQIGDSWNAYVRFPKLGKLKVKGFYRRFFPNDGWGSARILVEPSGYYLQVAVEQPDEVVKESDKAVGIDPGVANTLTLDNGRHVKPNAKLDRHQKRLLRLQRRASRQKRGSNSQQRTHQAIARQHEKIRRSRNAFNHKLSTKLTREYGAIAFEDTQLQNMTRRSKPKPREDGKGWEQNGAKRKTGLNRSLANIAIGDLKQKTKDKATALGREFITPDAKYSSQECHVCGERGERLSQSVFICLNPDCKEFRCEQHADTNAARNLLLRALPDLEREYRPWGWELKREESVSPTGGTTSNGETPSKLGMPPEAVTVLC

SEQ ID NO: 627 - protein, 484 aa, Unknown; identical to SEQ ID NO: 626
  Description of Unknown: aquatic-marine sequence

SEQ ID NO: 628 - protein, 484 aa, Unknown; identical to SEQ ID NO: 626
  Description of Unknown: aquatic-marine sequence

SEQ ID NO: 629 - protein, 484 aa, Unknown; identical to SEQ ID NO: 626
  Description of Unknown: aquatic-marine sequence

SEQ ID NO: 630 - protein, 574 aa, Unknown
  Description of Unknown: aquatic-marine-aqueous sequence
MNTITKVRKIEFKVTLDAQQRQVFEHHSRDLRFIWNTGLACIQWREWWEKWQQVLESPDRVGYEPETVPINWACNIVKSPKKKKKDEESEKKVYALACDRVQYRLEKTTNLELGTGEWTEPRKDRNGKIDEDHCWVAYPCKPEPVREHWTEEPRLLLLMKNPYMALRTMFAKKNWDPETVEGKIIHGLNTAWVAGECKALGDAWSSYKSGVRKRPRFKKRHDRSNLINPSSKQTKFSGNSLTLPGLGRVTVKGLQQRWGEKPACPIALIKEGDEFYLQLTGELEIPVVRSNKVTIGIDPGSVRLATTDNGAVIEAHKFGKQMTRRQKKLQASINRKLRLNSDRVYDESDSSRFYLKPRKNWKRKNLQKVRTKLQKLSAKTARQRRAYNHFHSTRIVQSADVIIMEGLELKNVTRAVKKGKSGEHNKRKAKAGLNRSLLDNAIGQFYGMIEQKAKDAGKVTARVNPFRTSMTCNKCGFSDAKNRKTQAGFHCQKCGHSDNADRNAALNIKRMGVLGVTKLTFDNDWNITVPGWIEPGDLVALHSKGLKPVGTAKKRSKRAGKEHPSQLALEIGSQ

SEQ ID NO: 631 - protein, 454 aa, Unknown
  Description of Unknown: aquatic-thermal springs-microbial mat sequence
MSQNNLTPKNIQHGCRLTKMQQQICEQWLDELRRLWNEALSYLLEVEENTVYNFADKCRYAVCKLSTEYRHYRWDDADGEPPINHYKVEESVDESRKKRTAGTYIFVPYTVCVAPKKPYAPICPIPQGHNHLDWTGSSGTFPEGFLRLDPSKLNRATGYAKLALLQKFTHKNCPHLKHIPANFIRGVLFSLATAWEKRFQRRDKYGRPGYPKFKSRKFPLTSLQYVDAVNLKREGDSLRFPVLGCVTARGISERFPVDIEIKVATLQKQPDGWYMIWNGWFPAIVAKPKNRSIAISFRQNNNLYVADNGYVMMPYQPPEQKLRRLERLRQILCGKQFLSKNWHRVKAKIAKYEHRLAMARRNHNHKISTFLVRKYDQLVVDNRKLGLIRKPEPIPVGVTPPRWAPNGATAVSEINQRKAHNAKGQFRNMVIEKSKTYQRAVRLAPVEPPSNTPS

SEQ ID NO: 632 - protein, 484 aa, Unknown
  Description of Unknown: biofilm metagenome sequence
MKTLEFKLDLTQEQQALINQWLADLKWVWNRGLRLLEEDQQRRWRVKHGHPLPDSLRLKWRNGKLVGCGIRKSREGYLCCPVRQDRDIEDARKLFASDSYHNKRNAPQWLHDVPARFRVGVRAQLKQAWKSYQDPKHPARRPRYKGKRDRLRSLTNLNAGGKKKELSPEQIGDSWNAYVRFPKLGRLKVKGFYKRFLPNDGWGSARILVEPSGYYLQVAVEQPDEPVKESDKAVGIDPGVANTLTLDNGRHVKPNAKLDRGQKRLLRLQRKASRQQRGSNSQQRTYQAIARQHEKIRRSRNAFNHKLSTKLTREYGAIAFEDTQLQNMTRRSKPKPREDGKGWEQNGAKRKTGLNRSLANIAIGDLRQKTKDKAAELGREFVTPDAKYSSQECHACGEKGERLSQSVFICLNPDCKEFNCEQHADTNAARNLLLRALPDLEREYRPWGWELKREESVSPTGGTTIFGETPSKLGMPPEAAMVSV

SEQ ID NO: 633 - protein, 614 aa, Unknown
  Description of Unknown: biofilm metagenome sequence
MILCQEFAVELSPPQEKNAIAWLEASKSLYNSALYELLRWDENTGFYCKETKSYLPCCSVPWEYRWHKESETLIPFSRIASEKSRWYIKNLPRHRVPTPAEEKDSWGWHCKDGGSGYSCPIPKDYCEPLLTRWERQARGGLGLVAKGDYWEKGHSVLDIPYKFRSGVLTMLETPWQEYLKSRFGQTTVKRGCPRFKRKRDRINTLIHPNPKGVIVPNRNQLKGVPKLGSLKVKGLVRRWRNPDGFVPPISIFKLIRRQGQWFVQLTGDLERSYPVKNTNRALGIDPGLKLEFGTSDGWSLPAARRYRKGQKQREKLQKQIAHKRKHNLVLWLNQAERQLQDVAGTIIPLKAESWAALQQCRTEKEFINLIGAARYNRLKYSVPTSNKILKLEERAAKHEARIARTRKAADDKLTSRIVREYGFIAIEHGLQGQKLRGKAKAKKREDGKGYAQTGAKRKSGVSKSLSDASIGRKTAMLERKAKRSNRTFAKIESAYTSQSCPVCGHLHKAPMDGDRVYHCECCGWHCDRDQSAGINIELMAYAANSTAKLSSAAELARVYGCFWMQDNPKETKPLWAKKLSKKKLAEWMKNIRASYPDKVLQNFELEYRKMKAQK

SEQ ID NO: 634 - protein, 484 aa, Unknown; identical to SEQ ID NO: 632
  Description of Unknown: biofilm metagenome sequence

SEQ ID NO: 635 - protein, 553 aa, Unknown
  Description of Unknown: crustacean metagenome sequence
MPKAKPTDKEKDKRPIKTLEFKLYPNQSQVLTLTDWLDRGRKVWNNGLAVLLEKDQQDWRKKAGFDPMEGSEAWQWFPNQVGSKTVFGACCAITFYNRRQNEHYPACPIRHPQDVDGAPRSLIYRATQLDNFCTRFKGGIGDDLLESWKAYKDKNRPTAKLPKFKGKQFPLKSLSNGECTAKIVGKTAIKFPLLGNIRTKGLERVPQDSKICTARICRKASGWYLQLAIRWDWPVPNVKMPDVAVAIDPGVRFATSTDYGRQVDAPQFMLKQTKKLRREQRKLSRRKLKGKNWQKQAAKIARLHEKVSRQRNAFWHKESTYFVTSFGGVAIEDNNFNNMGRKAKAKPKEDGKGYERNNQAQKRGLNRSLKDVACGRLKVMVETKAKTINNEVHLVRSHHNSQTCSECGHVAKDNRKSQSNFSCVACGHSLNADINAAINIYNRAAWSNRYNLHPVRLQVSNLERYPSFVGGIGKSHKPASASRKSRNGIEGQQEGGSLPPLEITKESRSPGLTRNKPASVSPSIGKPKRGQKPSTLCQIPETHTQLTLWDLTG

SEQ ID NO: 636 - protein, 547 aa, Unknown
  Description of Unknown: crustacean metagenome sequence
MENMTRVIKFRLTLTQNQQSLIDEKMRLLKYLWNLAVGLQEEVNQRRLRDKFEFKEFSPEFWETSYLSLYSSFPHIEKLPKDKIKLLAGNPCCKIAYLKNKKEYVSLKLEERKKRPYLGNPDAKKHTTKPPDKEDLKKYFYSDLADKIFEIGSEFRGCFYRYVISKAFETAKKGIRGFPKYKGKLDSVQSLIVGHPTLIKVRDGGIFLNKQIGLLVIDDINRLPKESDVRMASIVRKASGYYLHLTINLPVPMHFPSDRQIGIDVGCVNLYTDSEGRHIETKAYYRNKERKIAHLQRKMARQEKGSANYLKSKEKLALLHEQIKDRRAGYLHQVSHKLTQKYSHIAMEDLKLKNMTKRAGVKENEDGTYAHNGASAKSGLNKSILDQGIGELKRQLIYKSQEKGGRVVLVNPKYTSQTCFNCGHKHKDNRKSQSEFICVSCGYSANADENAAKNILTLSLISSTIGVLRSSLLSYPSLLGKAVSLLAYVCGSPKGTCEAERERSDPPINPPVKGGNCLDNFSTLTINPRHQSEKVSQPIDSVQLTIW

SEQ ID NO: 637 - protein, 557 aa, Unknown
  Description of Unknown: crustacean metagenome sequence
MSNFSENVRTKEFKLILSSEQERTLEDWMLVCKWVWNRSLGLIEEFNEWNPYDKLSKSNVPATPLQRYDRKLKQWVRIEIPDWKMGIERVEKKRGLIHPVAIDENSPIIDSLDSKKSVLYGFLKVFGHQHHKDRIVTYLVRGEERKVNFTDCPAKFIQGVAHELSKAWEGFLAGRHSRPRFKTAKDKVMTLIHYNAKDLGVKDSKVNIPKLGYIEVIGFDKRWYGCDFNPMKICKKASGWYIQLTASVTVKQAKKTGLCCGIDPGHQFVMALDNGHTIEAAQPLKRSLKRLRKMQQQLSRKYRMNEGKTKNWEKLNNKIAKLHEKIARHRRSFNHWHSTNLINWFDVIFVEDYKPANVYRKAKAKAKLDTEGNPVVAENGTVIYDKNSQKRKRGSNRTGSDVAIGQAIDLLETKAKEHGKLVIRVDNWGTTLCCAKCGHQEKKKLSQRTHKCSNCGYTVARDVNSGQNIKLKGLAQMAINQGVELSDNFWYKFLINKNSATPSCSKKATKKKPKKSDTITIPGDLFKNGVHDFLVAETAKTHAIINQMSLGDFDRNA

SEQ ID NO: 638 - protein, 550 aa, Unknown
  Description of Unknown: crustacean metagenome sequence
MLPKRHAYIGATCELIRDGGWWAKDESATPIAYRGKKLSADKLAKTKESDIWWSDGVAHERLYKFPMSKWMPPKPGKIPQDVANKPFQYMRVPSTLGGGLEIKKFEQLNNAKHLKEFGIHLPPGVSHFLCGLFAQFSESYKAWIDPKRPNAHKPRYRQPDDLMRSLYSNQMRYSTTYGCNAAPIEFLSRDGVGVIAMNSIFGDVEMYRGEIDRMPDGLIPRSFNFTQDASGYYISVVFCTMAEVNNTFAKAQYRRFAGKADEDRKAELKAAVDDAAAALKAETYNPGNGKTLGIDPGIKRQITAHDGEKTFHVKLSKRRHDKARRLVNRIDRLKSKLSRIKTANNIRLNAGKDLRRAAGVITIDGVTTTLKNEAKLQHRIRRLQLLQANMRRAYQHRVAVRLFRGGYSTIRFEATQVGNMSKRSKVKIKANGKYAKNNAAAKSGLNKSLANTAMAAQSTKIEARFKAAGRSFIAVPAHNTSQICHCCQIKGDRASQELFLCLNNLCVMAGIRQNADDNAAKNMYRETLATEPKRSTGSGLELGEEGDIDD

SEQ ID NO: 639 - protein, 500 aa, Unknown
  Description of Unknown: crustacean metagenome sequence
MDTSIVDQQQTETELSVIEFKLSPHNEAVKAWEYQLNELKTVWNSALALRIEADDRYWIKRLNLDAVCPSTALKRKGNKKQGKGQSPTQWRTIASGVVRPEKTKPIRARGAKTGIIAGPYCRVRKLQGVEPLDKQIIDADGNKITSALSRTQAISNYPWLDSSLVDSRYIAGVYRTLDQAWKAYKKGVRNRPKFKGKKDKLKSLANYSGSVRFERIGGGPNGWVNFPKLKPVKCKGLYKRYDDRMKTGTVKLCKKGGNWYLQLTRKDVPFNRLSDSDKAIGIDLGVKQNATTSEGKVYHCKQSKRIQQRIERLQRKAARQYRMNADEKHPTGRSTLGHQRTIGEISRLQDKQKRSRHAWQHKTSTKILKSNGVIVFEDLKLQNMTKRPKPKSDEKGGYAKNGAKAKAGLNRVILKSGLGGLRSKVESKGDRNNRTVIRVNPAYTSATCSNCGHRHTKEEKASYRPTQSQFICQKCGHTDNADINAAENILVSGLTMLDTV

SEQ ID NO: 640 - protein, 618 aa, Unknown
  Description of Unknown: crustacean metagenome sequence
MKAIRFKVCPTDEQVRSFNDLRSDLTQVWNLIHRVAMHNRSVEWFRWAEKTSSKDGSWDLHDCSLTPIMLPKRHAYIGATCELIRDGGWWAKDESATPIAYRGKKLSADKLAKTKESDIWWSDGVAHERLYKFPMSKWMPPKPGKIPQDVANKPFQYMRVPSTLGGGLEIKKFEQLNNAKHLKEFGIHLPPGVSHFLCGLFAQFSESYKAWIDPKRPNAHKPRYRQPDDLMRSLYSNQMRYSTTYGCNAAPIEFLSRDGVGVIAMNSIFGDVEMYRGEIDRMPDGLIPRSFNFTQDASGYYISVVFCTMAEVNNTFAKAQYRRFAGKADEDRKAELKAAVDDAAAALKAETYNPGNGKTLGIDPGIKRQITAHDGEKTFHVKLSKRRHDKARRLVNRIDRLKSKLSRIKTANNIRLNAGKDLRRAAGVITIDGVTTTLKNEAKLQHRIRRLQLLQANMRRAYQHRVAVRLFRGGYSTIRFEATQVGNMSKRSKVKIKANGKYAKNNAAAKSGLNKSLANTAMAAQSTKIEARFKAAGRSFIAVPAHNTSQICHCCQIKGDRASQELFLCLNNLCVMAGIRQNADDNAAKNMYRETLATEPKRSTGSGLELGEEGDIDD

SEQ ID NO: 641 - protein, 494 aa, Cyanothece sp.
MFAIKSMSELVQHHITIQLKAYLSTTQTALFENWTDSLRPLYNLALGLLYEEQQRRWRTNQKFLKNYLDKSSLQTYLNEIENKPDIYPVEWHITKALPECDWLTKEENEVRKKDNTKSLACRTINRDGNFFTPIRPYWHLEEPQKLAKFKCFTNQWLISCNLLTNYHLQKLLNVNMKVRQSFISMNLMEAWKRYQKGDFRKLKFKSKRNPVISLCNKQTNRIKFDPEANNCQLLGKEFGLIEFRGLHNRHQGQIQPRNGSLTKKADGYYLNLVFQVEHKPIPDSDLQVGIDPGLVTLLTLSDGKCISNQRFLKENERHLTVLQKKLSRQTPGSKNWEKTKKALAKIHKQTADHRKYYNHKVSTHLVNKYGAIAIEDTKLTNMNKRPKAEKREDGKGYEHNGAKAKAGLNQSFHDAGLGQLRAFLESKANSYENRHIERVRANYTSQKCSRCGHTDSENRLTQASFHCLKCGLEMPADLNAAINIEQTAFGLDKS

SEQ ID NO: 642 - protein, 505 aa, Cyanothece sp.
MKEKHGLVDQAMFAIKSMSELVQHHITIQLKAYLSTTQTALFENWTDSLRPLYNLALGLLYEEQQRRWRTNQKFLKNYLDKSSLQTYLNEIENKPDIYPVEWHITKALPECDWLTKEENEVRKKDNTKSLACRTINRDGNFFTPIRPYWHLEEPQKLAKFKCFTNQWLISCNLLTNYHLQKLLNVNMKVRQSFISMNLMEAWKRYQKGDFRKLKFKSKRNPVISLCNKQTNRIKFDPEANNCQLLGKEFGLIEFRGLHNRHQGQIQPRNGSLTKKADGYYLNLVFQVEHKPIPDSDLQVGIDPGLVTLLTLSDGKCISNQRFLKENERHLTVLQKKLSRQTPGSKNWEKTKKALAKIHKQTADHRKYYNHKVSTHLVNKYGAIAIEDTKLTNMNKRPKAEKREDGKGYEHNGAKAKAGLNQSFHDAGLGQLRAFLESKANSYENRHIERVRANYTSQKCSRCGHTDSENRLTQASFHCLKCGLEMPADLNAAINIEQTAFGLDKS

SEQ ID NO: 643 - protein, 494 aa, Cyanothece sp.
MFAIKSMSELVQHHITIQLKAYLSTTQTALFENWTDSLRPLYNLALGLLYEEQQRRWRTNQKFLKNYLDKSSLQTYLNEIENKPDIYPVEWHITKALPECDWLTKEENEVRKKDNTKSLACRTINRDGNFFTPIRPYWHLEEPAKLAKFKCFTNQWLISCNLLTNYHLQKLLNVTMKVRQSFISMNLMEAWKRYQKGDFRKLKFKSKRNPVISLCNKQTAIIKFDPEANNCQLLGKEFGLIEFRGLHNRHQGQIQPRNGSLTKKADGYYLNLVFQVEHKPIPDSDLQVGIDPGLVTLLTLSDGKCISNPRFLKENERHLTVLQKKLSRQTPGSKNWEKTKKALAKIHKQTADHRKYYNHKVSTHLVNKYGAIAIEDTKLTNMNKRPKAEKREDGKGYEHNGAKAKAGLNQSLHDAGLGQLRAFLESKANSYENRHIERVKANYTSQKCSRCGHTDKENRLTQASFYCLKCGLEMPADLNAAINIEQAAFGLDKS

SEQ ID NO: 644 - protein, 505 aa, Cyanothece sp.
MKEKHGLVDQAMFAIKSMSELVQHHITIQLKAYLSTTQTALFENWTDSLRPLYNLALGLLYEEQQRRWRTNQKFLKNYLDKSSLQTYLNEIENKPDIYPVEWHITKALPECDWLTKEENEVRKKDNTKSLACRTINRDGNFFTPIRPYWHLEEPAKLAKFKCFTNQWLISCNLLTNYHLQKLLNVTMKVRQSFISMNLMEAWKRYQKGDFRKLKFKSKRNPVISLCNKQTAIIKFDPEANNCQLLGKEFGLIEFRGLHNRHQGQIQPRNGSLTKKADGYYLNLVFQVEHKPIPDSDLQVGIDPGLVTLLTLSDGKCISNPRFLKENERHLTVLQKKLSRQTPGSKNWEKTKKALAKIHKQTADHRKYYNHKVSTHLVNKYGAIAIEDTKLTNMNKRPKAEKREDGKGYEHNGAKAKAGLNQSLHDAGLGQLRAFLESKANSYENRHIERVKANYTSQKCSRCGHTDKENRLTQASFYCLKCGLEMPADLNAAINIEQAAFGLDKS

SEQ ID NO: 645 - protein, 649 aa, Unknown
  Description of Unknown: freshwater bacterium LH6-2 Bacteria sequence
MKTICVKVRLTPEQEQEFKSAIDELEWIWNFSLKVHLYNHCIKWYDWAANTKQKIDKAIAEMDKLPPKQKEFVHNYFLGDPQLRPTKLDQSQRKLVDKEVYKILERWSPFDLEGIEKVPLRISERSAYFNASCVIAENGPYWFSEVIEQTDDQGEVIGKTKKWKLAQGRKPYTPLPKIPHKYILAPSGQYKDREIIDWTDLVVKAVLTSVRESEGLPPLNIHSNYINGLVSQNGSLQKAWVAFLDTSRQQSKRPKFKNEENRLNTLLNLYPPTILDEENSIEVRQLGKLEVVDRNWRKRLGQNISLRSHCITKKRSGYYVHVTVEHALQSEKTILVKQLTKIKKEKGVESQEYVELSEKITEMENTIRDSKVRLNKKQLSVGVDPGIQAVIATDQGDLYTPNLSRERITMHLEKLQHKLKHMQEINNAAWRQENTHKIEAGEQIDIKEKRPKTKNELKLEHKIARLHERGASSARHFNHKLSSRIARTYTHVCWEDTKLENLLKQCKAKPDLSGIGYLPNGAAAKRGLNWLLKQRCLGDLKERTKQKVLEYGGVWHNSAPKYSSQRCHCCGYEEPLQRDGSNFTCKNQDCELFGVSQNADVNAARNHKKSVFELGQVKYHNLSLQYNISARRRHRNRNKPKLTVVKLPE

SEQ ID NO: 646 - protein, 515 aa, Unknown
  Description of Unknown: freshwater metagenome sequence
MVTNRRIEFKVSLDQQQQQIFDHHIAKLQAVWNIGLACIEWREWWEKWQQVLESPDHPDYAPDAVPMGWGHNSIKGKKKPVYGLCCDRVKFRLEKNDPILDVGEWVEGTKKGSGDSIAGYWVAYPAKPDPVKEHWVEDPRLPKHGQDPYMSLVSMFGKKYWPSDHFIQGLSSAWIKGQCKNLATAWKAYKKGIRKRPQFKKRHEAGNSLLCVTRIPLKQNGMTLPGMGFVRIPKLAQRWDSIKDPCPISLLREGSRYYVQLTATLEQRPVRSNGVTVGIDPGSVHVATDDRGRMIDSPRYAKKQERRKRRLQRSMARKFRLNTTTVYDEDGRVLRHEPRKGWKRRNHAKVKQQLQSLEAHTKRARRAFNHFHSTRIVQSADVIVLENLQLQNIGAKVKTGKTGISNGRKRKTGLNNKLRDNAIGQLFAMVEQKAAAAGKLTTRVNPFRTSMTCNRCGFSDKANRVSQAVFHCQSCGHRANADQNAAANIRKMGLLGVTKLTFDNDWRITVPNWHD

SEQ ID NO: 647 - protein, 660 aa, Unknown
  Description of Unknown: freshwater metagenome sequence
MTIMKTICIKVKLSPEQEREFSNATQELEWIWNFSLKTYIHNHCVKWYEWATGIKVKIDKALAEIEKLPPEQKEFVYNYFLNPSLRPSKMTQQQNKLVDKEVYKILTMWSPFDFDGITKVPLRLSERSAYIGASCAIAEGGPYWISEIIEEKDESGEVIKHRKWKLVNGKPYMPINKKEHSYPLVPSGQYKDREIIDWTDLVVKAVLTSVRESEGLSPLTLHSNYINGLVSQNGSFQKSWSAFLDVKRMQSKRPKFKNEEYKLNTLLNLYPPTISEDEDWIEVRQLGKLEVIDRNWRKRMGGDSPRSHCITKKKSGYYVNITTEHPLHSEKTVLLKQLAKIKKEQGKDSQEYLDLEATIASMTEKIRGSKVKPKNKELAVGIDPGINAIIATDQGDLYMPNLSRERITFHIEKLQAKLKHMQDVNDKVWRQENQRQLEDGEKLEIKTKRPKTNNELKLEHKIARLHERGASSSRHFNHKLSSRIARTYKHVCWEDTKIENLMKSPKAKPDLSGIGYLPNGAAAKRSLNWLFKQRCLGDLKERTKQKVLEYGGVWHDSAPKYSSQKCHCCGYTEPLQRDGSNFTCKNEACKMYGISQSADVNAARNHKKSVFELGEVKYHNLSLEYNVSARWKHRNRNKVKPVVSVTKLPTTSTPVPNKPK

SEQ ID NO: 648 - protein, 657 aa, Unknown
  Description of Unknown: freshwater metagenome sequence
MKTICIKVKLSPEQEREFSNATQELEWIWNFSLKTYIHNHCVKWYEWATGIKVKIDKALAEIEKLPPEQKEFVYNYFLNPSLRPSKMTQQQNKLVDKEVYKILTMWSPFDFDGITKVPLRLSERSAYIGASCAIAEGGPYWISEIIEEKDESGEVIKHRKWKLVNGKPYMPINKKEHSYPLVPSGQYKDREIIDWTDLVVKAVLTSVRESEGLSPLTLHSNYINGLVSQNGSFQKSWSAFLDVKRMQSKRPKFKNEEYKLNTLLNLYPPTISEDEDWIEVRQLGKLEVIDRNWRKRMGGDSPRSHCITKKKSGYYVNITTEHPLHSEKTVLLKQLAKIKKEQGKDSQEYLDLEATIASMTEKIRGSKVKPKNKELAVGIDPGINAIIATDQGDLYMPNLSRERITFHIEKLQAKLKHMQDVNDKVWRQENQRQLEDGEKLEIKTKRPKTNNELKLEHKIARLHERGASSSRHFNHKLSSRIARTYKHVCWEDTKIENLMKSPKAKPDLSGIGYLPNGAAAKRSLNWLFKQRCLGDLKERTKQKVLEYGGVWHDSAPKYSSQKCHCCGYTEPLQRDGSNFTCKNEACKMYGISQSADVNAARNHKKSVFELGEVKYHNLSLEYNVSARWKHRNRNKVKPVVSVTKLPTTSTPVPNKPK

SEQ ID NO: 649 - protein, 556 aa, Unknown
  Description of Unknown: freshwater metagenome sequence
MNTITKVRKVEFKVALDVQQQQVFEHHSRDLRFIWNTGLACIQWREWWEKWQQVLESPDRVGYAPEPVQMDWGYNLVGKKKVYGLVCDRVRFRLEKSEPVLAAGEWVAGEKQGGGYWVAYPCKPEPVREHWTEEPRLPLLMKNPYMALRTMFAKKNWDPETIGGKIIHGLNTAWVAGECKALGDAWSSYKSGVRKRPRFKKRHDRSNLINPSSKQTKFSGNSLTLPGMGRVAVKGLQQRWGDKPACPIALIREGDEFYLQLTGEVQVPAVRSNKITIGIDPGSVRMATTDNGAVIDAPKFGKRIKRRQEKLQASINRKLRLNSDRVYDESDSSKFYLKPRRNWKRKNLQKVRTKLQRLSAKAARQRRAYNHFHSTRIVQSADVIIMEGLELKNVTRAVKKGKSGEHNKRKAKAGLNRSLLDNAIGQFYGMIEQKAKDAGKATTRVNPFRTSMTCNKCGFSDAKNRKTQAGFHCQKCGHSDNADRNAALNIKRMGVLGVTKLTFDNDWNITVPGWVEQKTVEPLQVRDFKPVGTVKKRSKKTEQKRSSQMALEIGSP

SEQ ID NO: 650 - protein, 560 aa, Unknown
  Description of Unknown: freshwater metagenome sequence
MDNYIETTRTKEFKLILTPEQERTLENWMLVCKWVWNRSLGLIEEFNDWNPYDKLSKSYAPAMPLQRYDRKLKQWVRVEIPEWKLNTKTKETSKGLVHPVSIDENSPQIDSLNSKKSVLYGFLKIFGHQYHKDRIITYMVRGEERKVKFTDCPAKFIQGVSHELSKAWDGFLAGRHSRPRFKTAKDKVMTLLHYNAKDIGIQGSKINIPKLGYVEVIGFDKRWYGVDFNPMKICKKSSGWYIQFTAVVPVKKFKKTGLACGIDPGHQFVMALDNGHIIKAAQPLKQNLRRLRRMQKQLSRKYRMNNGKTKNWEKLNQRIAKLHEKIARHRRSFNHWHSTNLVKWFDIIFVEDYKPANVYRKAKAKAKTDEQGNPVTAENGAVIYEKNNQKRKRGNNRTGRDIAIGQAIELLETKAKEHGKLVIRVPAYGTTLCCAKCGHEERKSLSQRVHHCSSCGYIVARDVNSGQNVKLKGLAQLALDHGVELSDNFWYQILKNATIDSCSGKKGKKTTKKKDAVSIPGDLFKNGIAAFLITETAKTRAIIERNHLENLNKTAKSLMG

SEQ ID NO: 651 - protein, 657 aa, Unknown; identical to SEQ ID NO: 648
  Description of Unknown: freshwater metagenome sequence

SEQ ID NO: 652 - protein, 572 aa, Unknown
  Description of Unknown: freshwater metagenome sequence
MHTTKTRKIEFKVRLDLQQQQVFEHHSQALRFIWNTGLACIHWREWWEKWQQVLESPDRPGYCPDPVDMGWGHNLVGEKKVYGLCCDRVRFRLEKEEPVLGVGEWIEGEKLGSGKRVAGYWVAYPAKPDIVREHWEQEPRLVLLMKNPYKALKTLFAKKNWDPDSVEGKIIHSLNTSWVAGECKALGDAWSSYKSGVRKRPRFKKRHKRSNLINPSSKQTKFFKNSLTLPGMGRVTVKGLDKRWGNKPACPIALIKEGSDFYLQLTGAVEVRTVRSNRSNGVAIGIDPGSVHVATDDHGKTIEPPRYGKKAMRRIQKLQASINRKLRINSEKVYDPENPEKFYLKPDKNWKRKNLKKVRAKIQRLSAKVVRSRRAFNHFHSTRLVQSADTIVLEDFKLKNVTRAVKEGESGVQNGRKAKAGLNKNLLDNAIGQLYGMIEQKAKDAGKMTARVNPFRTSQTCNRCGFSDGKNRPSQAVFRCQKCNHCDNADRNAALNIKRMGMLGVTKLTFDNDWNITVPGWVAAAPAEPSKPHKPVKPADSSLSKDLKPKNDCPSARSKPKTIEGSQMKLAL

SEQ ID NO: 653 - protein, 581 aa, Unknown
  Description of Unknown: freshwater metagenome sequence
MKPFLSIPSMHTTKTRKIEFKVRLDLQQQQVFEHHSQALRFIWNTGLACIHWREWWEKWQQVLESPDRPGYCPDPVDMGWGHNLVGEKKVYGLCCDRVRFRLEKEEPVLGVGEWIEGEKLGSGKRVAGYWVAYPAKPDIVREHWEQEPRLVLLMKNPYKALKTLFAKKNWDPDSVEGKIIHSLNTSWVAGECKALGDAWSSYKSGVRKRPRFKKRHKRSNLINPSSKQTKFFKNSLTLPGMGRVTVKGLDKRWGNKPACPIALIKEGSDFYLQLTGAVEVRTVRSNRSNGVAIGIDPGSVHVATDDHGKTIEPPRYGKKAMRRIQKLQASINRKLRINSEKVYDPENPEKFYLKPDKNWKRKNLKKVRAKIQRLSAKVVRSRRAFNHFHSTRLVQSADTIVLEDFKLKNVTRAVKEGESGVQNGRKAKAGLNKNLLDNAIGQLYGMIEQKAKDAGKMTARVNPFRTSQTCNRCGFSDGKNRPSQAVFRCQKCNHCDNADRNAALNIKRMGMLGVTKLTFDNDWNITVPGWVAAAPAEPSKPHKPVKPADSSLSKDLKPKNDCPSARSKPKTIEGSQMKLAL

SEQ ID NO: 654 - protein, 557 aa, Unknown
  Description of Unknown: freshwater metagenome sequence
MSNFSDNVRTKEFKLILSSEQERTLEDWMLVCKWVWNRSLGLIEEFNEWNPYDRISKSNVPATPLQRYDRKLKQWVRIEIPDWKMGIERVEKKRGFIHPVAIDENSPVIDSLDSKKSVLYGFLKMFGHQHHKDRIVTYLIRGEERKVNFTDCPAKFIQGVAHELSKAWEGFLAGRHSRPRFKTAKDKVMTLIHYNAKDLGVKDGKINIPKLGYIEVIGLDKRWYGCDFNPMKICKKASGWYIQLTASVPIKQAKKTGLCCGIDPGHQFVMALDNGHTIEAAQPLKRGLKRLRKMQQQLSRKYRMNGGKTKNWEKLNNKIAKLHEKIARHRRSFNHWHSTNLINWFDVIFVEDYKPANVYRKAKAKAKLDTEGAPMVAANGTAIYEKNNQKRKRGSNRTGNDVAIGQAIDLLETKGKEHGKLVIRVDNWGTTLCCAKCGHQEKKKLSQRTHKCSNCGYTVARDVNSGQNIKLKGLAQMAINQGVELSDNFWYKFLIDKNSATPSGSKKATKKKPKKSDTVIIPDDLFKNGVHEFLIGETAKTRAIINEMSLGNFDRNA

SEQ ID NO: 655 - protein, 558 aa, Unknown
  Description of Unknown: freshwater metagenome sequence
MSSNFSENVRTKEFKLILSSEQERTLEDWMLVCKWVWNRSLGLIEEFNEWNPYDKLSKSNVPATPLQRYDRKLKQWVRIEIPDWKMGIERVEKKKGLIHPVAIDENSPIIDSLDSKKSVLYGFLKVFGHQHHKDRIVTYLVRGEERKVNFTDCPAKFIQGVAHELSKAWEGFLAGRHSRPRFKTAKDKVMTLIHYNAKDLGVKDSKINIPKLGYIEVIGFDKRWYGCDFNPMKICKKASGWYIQLTASVPVKQAKKTGLCCGIDPGHQFVMALDNGHTIEAAQPLKRSLKRLRKMQQQLSRKYRMNEGKTKNWEKLNNKIAKLHEKIARHRRSFNHWHSTNLINWFDVIFVEDYKPANVYRKAKAKAKLDTEGNPVVAENGTVIYDKNSQKRKRGSNRTGSDVAIGQAIDLLETKAKEHGKLVIRVDNWGTTLCCAKCGHQEKKKLSQRTHKCSNCGYTVARDVNSGQNIKLKGLAQMAINQGVELSDNFWYKFLINKNSATPSCSKKATKKKTKKSDTITIPDDLFKNGVHDFLVAETTKTHAIINQMSLGDFDRNA

SEQ ID NO: 656 - protein, 557 aa, Unknown
  Description of Unknown: freshwater metagenome sequence
MSNFSDNVRTKEFKLILSSEQERVLEDWMLVCKWVWNRSLGLIEEFNEWNPYDKISKSNVPATPLQRYDRKLKQWVRIEIPDWKMGIERVEKKRGFIHPVAIDENSPVIDSLDSKKSVLYGFLKMFGHQHHKDRIVTYLIRGEERKVNFTDCPAKFIQGVAHELSKAWEGFLAGRHSRPRFKTAKDKVMTLIHYNAKDLGVKDGKINIPKLGYIEVIGLDKRWYGCDFNPMKICKKASGWYMQLTASVPVKQAKKTGLCCGIDPGHQFVMALDNGHTIEAAQPLKRGLKRLRKMQQQLSRKYRMNGGKTKNWEKLNNKIAKLHEKIARHRRSFNHWHSTNLINWFDVIFVEDYKPANVYRKAKAKAKLDTDGAPMVAANGTAIYEKNNQKRKRGSNRTGNDVAIGQAIDLLETKGKEHGKLVIRVDNWGTTLCCAKCGHQEKKKLSQRTHKCSNCGYTVARDVNSGQNIKLKGLAQMAINQGVELSDNFWYKFLIDKNSATPSGSKKATKKKPKKLDTVIIPDDLFKNGVHEFLIGETAKTRAIINEMSLGNFDRNA

SEQ ID NO: 657 - protein, 574 aa, Unknown
  Description of Unknown: freshwater metagenome sequence
MNTITKVRKIEFKVTLDAQQRQVFEHHSRDLRFIWNTGLACIQWREWWEKWQQVLESPDRVGYEPETVPINWACNIVKSPKKKKKDEESEKKVYALACDRVQYRLEKTTNLELGTGEWTEPRKDRNGKIDEDHCWVAYPCKPEPVREHWTEEPRLLLLMKNPYMALRTMFAKKNWDPETVEGKIIHGLNTAWVAGECKALGDAWSSYKSGVRKRPRFKKRHDRSNLINPSSKQAKFSGNSLTLPGLGRVTVKGLQQRWGEKPACPIALIKEGDEFYLQLTGELEIPVVRSNKVTIGIDPGSVRLATTDNGAVIEAHKFGKQMTRRQKKLQASINRKLRLNSDRVYDESDSSRFYLKPRKNWKRKNLQKVRTKLQKLSAKTARQRRAYNHFHSTRIVQSADVIIMEGLELKNVTRAVKKGKSGEHNKRKAKAGLNRSLLDNAIGQFYGMIEQKAKDAGKVTARVNPFRTSMTCNKCGFSDAKNRKTQAGFHCQKCGHSDNADRNAALNIKRMGVLGVTKLTFDNDWNITVPGWIEPGDLVALHSKGLKPVGTAKKRSKRAGKEHPSQLALEIGSQ

SEQ ID NO: 658 - protein, 613 aa, Unknown
  Description of Unknown: freshwater metagenome sequence
MKTIKIKLSITPSQSQLIEGYFSELSWIWNKILASEVNNHATQWYKWAAKQSGKCWPAFSLDGANMTPLRFGKSAFIGAACQIAIGGAYWKRDDSINVAIKVKGKTEFRKGGKWMKGDRPYTPVPITDYQPRTFTDGTPLLKPADWDRVGKLNQLREADGLPPLSLPSDYIGGLVAHFDTAWKAWLDPKLKSRGKLKFKNPREGFVESLSNPQKPPSIDFENETIRIPGIGAIAVGDRSWRDRIPSGGVPRTYTVNSKPSGWYINIVFANALQPSLKKMEKAAAAVKSQYGKESPEYLEARASVSAIASQISEAGFVDRKPLSIGIDPGVNAIIGTDHGALFRPNLARERASVRVEYLSAKLATVKELNDKQWKDAGSKRPDTKNEIRLKYQIARTHEKGANSSNAFNHKLSTRLVGTYTAIAWEDTQLTNLLKQATPKASEEGVGYEKNGAAAKRGLNWSLKQRCLGDLKAKTKQKMGVLGGEFIDSPAPYSSRECSCCGAVGDRTEQHEFICKNELCEAYLIPKQADVNAARNHAKNAGFSISDVIHSADKLIYSRPTRRRKKVILLADNRSLGGIDRKVLTRKAQVPGVKEKATTLIDAPELWGTIPKKA

SEQ ID NO: 659 - protein, 548 aa, Unknown
  Description of Unknown: freshwater metagenome sequence
MENMTRVVKFRLTLTEEQQSLIDEKMRLLKYLWNLAVGLQEEVNQRRLRDKFEFKEFSPEFWETSYLSLYSSFPHIEKLPKDKTKLLVGNPCCKIAYLKNKKEYVLLKLEERKKRPYLGNPDAKKHTTKPPDKEALKKYFYPDLADKIFEIGSEFRGCFYRYVISKAFETAKKGIRGFPKYKGKLDSVQSLIVGHPTLIKIRDSGIFLNKQIGLLVIDDINRLSKESDVRMASIVRKASGYYLHLTINLPVPMHFPSDRQIGIDVGCVNLYTDSEGRHIETKAYYRNKERKIAHLQRKMARQEKGSANYLKSKEKLALLHEQIKDRRAGYLHQVSHKLTQKYSHIAMEDLKLKNMTKRAGVKENEDGTYAHNGASAKSGLNKSILDQGIGELKRQLIYKAEEKGGRVVLVNPKYTSQTCFNCGHKHKDNRKSQSEFICVSCGYSANADENAAKNILTLSLISSTIGVLRSSLLSYPSLLGKAVSLLAYVCGSPKGTCEAERERSDPPINPPVKGGNCLDNFSTLTIKDPRHQSEKVSQPIDSVQLTIW

SEQ ID NO: 660 - protein, 557 aa, Unknown
  Description of Unknown: freshwater metagenome sequence
MSNFSDNVRTKEFKLILSSEQERVLEDWMLVCKWVWNRSLGLIEEFNEWNPYDKISKSNVPATPLQRYDRKLKQWVRIEIPDWKMGIERVEKKRGFIHPVAIDENSPVIDSLDSKKSVLYGFLKMFGHQHHKDRIVTYLIRGEERKVNFTDCPAKFIQGVAHELSKAWEGFLAGRHSRPRFKTAKDKVMTLIHYNAKDLGVKDGKINIPKLGYIEVIGLDKRWYGCDFNPMKICKKASGWYMQLTASVPVKQAKKTGLCCGIDPGHQFVMALDNGHTIEAAQPLKRGLKRLRKMQQQLSRKYRMNGGKTKNWEKLNNKIAKLHEKIARHRRSFNHWHSTNLINWFDVIFVEDYKPANVYRKAKAKAKLDTDGAPMVAANGTAIYEKNNQKRKRGSNRTGNDVAIGQAIDLLETKGKEHGKLVIRVDNWGTTLCCAKCGHQEKKKLSQRTHKCSNCGYTVARDVNSGQNIKLKGLAQMAINQGVELSDNFWYKFLIDKNSATPSGSKKATKKKPKKSDTVIIPDDLFKNGVHEFLIGETAKTRAIINEMSLGNFDRNA

SEQ ID NO: 661 - protein, 471 aa, Unknown
  Description of Unknown: freshwater metagenome sequence
MERVEKKRGFIHPVAIDENSPVIDSLDSKKSVLYGFLKMFGHQHHKDRIVTYLIRGEERKVNFTDCPAKFIQGVAHELSKAWEGFLAGRHSRPRFKTAKDKVMTLIHYNAKDLGVKDGKINIPKLGYIEVIGLDKRWYGCDFNPMKICKKASGWYMQLTASVPVKQAKKTGLCCGIDPGHQFVMALDNGHTIEAAQPLKRGLKRLRKMQQQLSRKYRMNGGKTKNWEKLNNKIAKLHEKIARHRRSFNHWHSTNLINWFDVIFVEDYKPANVYRKAKAKAKLDTDGAPMVAANGTAIYEKNNQKRKRGSNRTGNDVAIGQAIDLLETKGKEHGKLVIRVDNWGTTLCCAKCGHQEKKKLSQRTHKCSNCGYTVARDVNSGQNIKLKGLAQMAINQGVELSDNFWYKFLIDKNSATPSGSKKATKKKPKKSDTVIIPDDLFKNGVHEFLIGETAKTRAIINEMSLGNFDRNA

SEQ ID NO: 662 - protein, 525 aa, Unknown
  Description of Unknown: fungi-freshwater sequence
MPKAKPTDKEKDKRPIKTLEFKLYPNQSQVLTLTDWLDRGRKVWNNGLAVLLEKDQQDWRKKVGFDPMDGNEAWQWFPNQVGGKTVFGLCCAITFYNRRQNEHYPACFIRHPQNVDGAPRSLIYRATQLDNFCTRFKGGIGDDLLESWKAYKDKNRPTAKLPKFKGKRFPLKSLSNGECTAKIVGKTAIKFPLLGNIRTKGLERVPQDSKICTARICRKASGWYLQLAIRWDWPVPNVKMPDVAVAIDPGVRFATSTDYGRQVDAPQFMLKQTKKLRREQRKLSRRKLKGKNWQKQAAKIARLHEKVSRQRNAFWHKESTYFVTSFGGVAIEDNNFNNMGRKAKAKPKEDGKGYERNNQAQKRGLNRSLKDVACSRLKVMVETKAKTINNEVHLVRSHHNSQTCSECGHVAKDNRKSQSNFSCVNCGHSLNADINAAINIYNRADWSNRYNLHPRRLQVSDMERYPSFDGGIDASQKPATVHGKPSNGTRSQQEGESSPLSEITEKSRSHGLAKPVQLSLWDIVA

SEQ ID NO: 663 - protein, 548 aa, Unknown
  Description of Unknown: fungi-freshwater sequence
MENMTRVVKFRLTLTENQQSLIDEKMRLLKYLWNLAVGLQEEVNQRRLRDKFEFKEFSPEFWETSYLSLYSSFPHIEKLPKDKIKLLAGNPCCKIAYLKNKKEYVLLKLEERKKRPYLGNPDAKKHTTKPPDKEDLKKYFYPDLADKIFEIGSEFRGCFYRYVISKAFETAKKGIRGFPKYKGKLDSVQSLIVGHPTLIKVRDGGIFLNKQIGLLVIDDINRLPKESDVRMASIVRKASGYYLHLTINLPVPMHFPSDRQIGIDVGCVNLYTDSEGRHIETKAYYRNKERKIAHLQRKMARQEKGSANYLKSKEKLALLHEQIKDRRAGYLHQVSHKLTQKYSHIAMEDLKLKNMTKRAGVKENEDGTYAHNGASAKSGLNKSILDQGIGELKRQLIYKSQEKGGRVVLVNPKFTSQTCFNCGHKHKDNRKSQSEFICVSCGYSANADENAAKNILTLSLISSTIGVLRSSLLSYPSLLGKAVSLLAYVCGSPKGTCEAERERSDPPINPPVKGGNCLDNFSTLTIKDPRHQSEKVSQPIDSVQLTIW

SEQ ID NO: 664 - protein, 550 aa, Unknown
  Description of Unknown: fungi-freshwater sequence
MSQENITRVVKFRLTLTENQQSLIDEKMRLLKYLWNLAVALQEEVNQRRLRDKFGFKEFSPEFWELSYLKLYSDFSHIEKLPKDKTKLLVGNPCCKIAYLKNKKDYTPIKLEERKKRPYLGNPDAKKHTAKPPDKKDLKKYFYPDLADKIFEIGSEFRGCFYRYVISKAFETAKKGIRGFPKYKGKLDSVESLIVGHPTLIKIRDGGIFLNKQIGLLVIDDINRLPKDSDVRMASIVRKASGYYLHLTVNLPVPMHFPSDRQIGIDVGCVNLYTDSEGRHIETKAYYRNKERKIAHLQRKMARQEKGSANYLKSKEKLALLHEQIKDRRAGYLHQVSHKLTQKYSHIAMEDLKLKNMTKRANVKENEDGTYAHNGASAKSGLNKSILDQGIGELKRQLLYKSQEKGGQVVLVNPKFTSQTCFECGHKHKDNRKSQSEFICVSCGHSANADENAAKNILTLSLISSTIGVLRSSLLSYPSLLGKAVSLLAYVCGSPKGTREAERERSDPPIDPPAKGGNCLDNFSTLTIKDPRHQSEKASQPIDSVQLTLF

SEQ ID NO: 665 - protein, 559 aa, Unknown
  Description of Unknown: fungi-freshwater sequence
MIQTNIEDKMSQENITRVVKFRLTLTENQQSLIDEKMRLLKYLWNLAVALQEEVNQRRLRDKFGFKEFSPEFWELSYLKLYSDFSHIEKLPKDKTKLLVGNPCCKIAYLKNKKDYTPIKLEERKKRPYLGNPDAKKHTAKPPDKKDLKKYFYPDLADKIFEIGSEFRGCFYRYVISKAFETAKKGIRGFPKYKGKLDSVESLIVGHPTLIKIRDGGIFLNKQIGLLVIDDINRLPKDSDVRMASIVRKASGYYLHLTVNLPVPMHFPSDRQIGIDVGCVNLYTDSEGRHIETKAYYRNKERKIAHLQRKMARQEKGSANYLKSKEKLALLHEQIKDRRAGYLHQVSHKLTQKYSHIAMEDLKLKNMTKRANVKENEDGTYAHNGASAKSGLNKSILDQGIGELKRQLLYKSQEKGGQVVLVNPKFTSQTCFECGHKHKDNRKSQSEFICVSCGHSANADENAAKNILTLSLISSTIGVLRSSLLSYPSLLGKAVSLLAYVCGSPKGTREAERERSDPPIDPPAKGGNCLDNFSTLTIKDPRHQSEKASQPIDSVQLTLF

SEQ ID NO: 666 - protein, 391 aa, Unknown; identical to SEQ ID NO: 619
  Description of Unknown: lake water metagenome sequence

SEQ ID NO: 667 - protein, 385 aa, Unknown
  Description of Unknown: lake water metagenome sequence
MKVLEFKIHPTEEQVSKIDQSLAACKLLWNLSIALKEESKQRYYRKKHKFDEFSPEIWELSYSGHYDEKEFKSLKDKEKKLLIGNPCCKIAYFKKTSNGKEYTPLDAIPIRRFMNAENIDKDAVNYLNRKKLAFYFRENTAKFIGEIETEFKKGFFKSVIKPAYDAAKKGIRGIPRFKGRRDKVETLVNGQPGTIKIKSNGVIVSSKIGLLKVRGLDRLQGKAPRMAKITRKATGYYLQLTVETDDTIYKESDKCVGLDMGAVAIFTDDLGRQSEAKRYAKIQKKRLDRLQRQASRQKDGSNNQRKTYAKLARVHEKIARQRKGRNAQLAHKITSEYQSVILEDLKLKNMTAAAKPKEREDGDGYKQNGKKRKSGLNKALLEMSV

SEQ ID NO: 668 - protein, 623 aa, Unknown
  Description of Unknown: lake water metagenome sequence
MKTIKIKIKLTTDQVQLCDRYLEELTWLWNLTLSNQLHNHCVTWYAWAAKLSADLDKATEKLDKLKPEQQQLIKDYYRTKDKPKLSKKEQELVAKFDIFARWNSFSLDGIIPVPLRLGNSGYEGLSCQIATGGNYWKRDENINIPINTKKGIVHVKGYKLVKGDKPWQRIEIVPHKYRTFPGGKFEGRELTTLEKLDNVNGLNTLRAFQNLPDLQVSSHYIGGLLAFFKESWSAFLDPKRMNSRKPKFKKDSDKITTLSNNQCAPNRIDVNKNIVTVTGFSPIAIIDKNWVKRLNLSEVLPRTYMLTQNPSGYYINIVIAHPLHEEKTALVKKLPKVKKEFGEDSQEYEDIKSKIKFLEQQIKEASIVKGKDLSVGIDPGVQAVVSTDHGALFLPNLTRERVSIHIEELQSRLDNIELINDKKWKSLGNKTPRIKTKNETKLQEKISRLHERGANSSNAFNHKLSTRLSRTYEHIAWEDTQINNLLKQVEPKALPEGIGYAHNGASAKRGLNWIMRQRCLSDLKAKTKQKTENRGGNFHEPPANYSSQTCHCCKQKGERRSQHEFICKNSDCKLFDISQQADTNAARNHKQNGGFDLGDVKYHNVKLVYQKPKRFKKKRLTNQ

SEQ ID NO: 669 - protein, 613 aa, Unknown
  Description of Unknown: microbial mat metagenome sequence
MKTIKIKLSITPNQSQLIESYFSELSWIWNKILASELSNHATQWYKWAAKQSGKGWPVFSLDGANMTPLRFGKSAFIGAACQIAIGGAYWKRDDSINVAIKVKGKIEFRKGGKWMKGDRPYTPVPITDYQPRTFTDGTPLLKPADWDRVGKLNQLRETDGLPPLSLPSAYIGGLVAHFDAAWKAWLDPKLKSRGKLKFKNPENGFVASLFDRYPPTCIDLENETIRIPGIGAIAVGDRSWKDRIPSGGVPRTYTVNSKPSGWYINIVFANALQPSLKKMEKAAAAVKSQYGKESPEYLEARASVNAIAFQISEDGFVDRKPLSIGIDPGVNAIIGTDHGALFRPNLARERASVRVEYLSAKLDAIKELNDKQWKDAGSKRPDTKNEIKLKYQIARTHEKGANSSNAFNHKLSTRLVGTYTAIAWEDTQLTNLLKQATPKASEEGVGYEKNGAASKRGLNWSLRQRCLGDLKAKTKQKMGVLGGEFIDSPAPYSSRECSCCGAVGDRTEQHEFICKNELCTAYLIPKQADVNAARNHAKNAGFSISDVIHSADKLIYSRPTRRRKKVVSLADNRSLGGIDRKVLTRKAQAPGVKEKATTLIDAPELWGTIPKKA

SEQ ID NO: 670 - protein, 522 aa, Unknown
  Description of Unknown: microbial mat metagenome sequence
MLTLEFKLSLTTCQEQRLEAWLRDMNWIHNSALACIESFNAHNAYNKEDKRSYACNPVVSYWRGQVYPSCPVGHQLTQFDEESYAAALLERKNKKGTVYPLQAWAGEPRLENVSYFSLLNRFPKKLHPIKLADVPQKFVAGRVERVALSWQAFLKGNAKPPKFKSRRNPVTSLIHNESKKIRIDGDRINMPRIGWLKAKGLAKRWPQGVPFCPMKVIKAADGWYLQLTGEVEERKSPKLTGRHVGIDPGSVRHHTTDSGSFVEPPRYLMKAAVKLRTLQRQLSRQYRQNSTQIFGKDGRVIRSVARSDWDRKNFDKTKAKIAKLHAKIARQRRAFNHFQSSKYVTMFDVITVEDFEPAKLTRAVKKGEAGVRNGRKAKSGLNRNLLDNAIGQFYGMLEQKSKDRGRAFQRVKPAFSSRTCNCCGYRSKDNRKSQSSFVCLSCGHRDNADRNAARNIKRMAELGIDRLTFTDDFADGFREQVGVDGAKDVVSLPKKAKKRGSRKSTMEVSCQLTLDEGSSNSL

SEQ ID NO: 671 - protein, 532 aa, Propionimicrobium lymphophilum
MSYLCARGRFNLSGFSTGSMGVLPVRASLFALLFTTLHGARISAHWYGMSKENDHTVTCIKICLEPNKAQRAQFASFAGSARWAYNFALAIKIGYQKRWFEARKQFIESGLDEKAAGKKASEQVGRMPNYMSIATNEWTQLRDEVCPWYPEVPRRVFVGGFQRADAAFKNWFDSKSGRRSGAAMGWPKFKSKSKSRESFVIANDVQPAFVANLNRYIKTGELADMDYRHIKVPKCGEVRLTPGSAGQLRQLGRTMLAEAKTGELITRITSGTISRLGDRWYVSLVISGPFVPDAISTKRQRRNGVVGVDLGSGRFYATTSEGLSIINPKFVSKYEQELARANRALAKTAKGSAARKKALARLRRVHARSALARDGFSHQVSAWLTSQFAGVAVEKFDLASMLASAKGTVEKPGKNVDVKARFNAHLADVGIASTIDKLLYKGKRDGCRVQVVNTLDNSSTTCAKCGHTCVCGPEQKTFTCPDCGYNAPRQLNSAQYIRQLATVGFDELGLDMTASLTPDTGKRPIAFMTSAH

SEQ ID NO: 672 - protein, 513 aa, Propionimicrobium lymphophilum
MGVLPVRASLFALLFTTLHGARISAHWYGMSKENDHTVTCIKICLEPNKAQRAQFASFAGSARWAYNFALAIKIGYQKRWFEARKQFIESGLDEKAAGKKASEQVGRMPNYMSIATNEWTQLRDEVCPWYPEVPRRVFVGGFQRADAAFKNWFDSKSGRRSGAAMGWPKFKSKSKSRESFVIANDVQPAFVANLNRYIKTGELADMDYRHIKVPKCGEVRLTPGSAGQLRQLGRTMLAEAKTGELITRITSGTISRLGDRWYVSLVISGPFVPDAISTKRQRRNGVVGVDLGSGRFYATTSEGLSIINPKFVSKYEQELARANRALAKTAKGSAARKKALARLRRVHARSALARDGFSHQVSAWLTSQFAGVAVEKFDLASMLASAKGTVEKPGKNVDVKARFNAHLADVGIASTIDKLLYKGKRDGCRVQVVNTLDNSSTTCAKCGHTCVCGPEQKTFTCPDCGYNAPRQLNSAQYIRQLATVGFDELGLDMTASLTPDTGKRPIAFMTSAH

SEQ ID NO: 673 - protein, 522 aa, Unknown
  Description of Unknown: sediment metagenome sequence
MLTLEFKLSLTISQEQRLEAWLRDMSWVHNSALACIESFNAHNAYHKGDKRSYACNPVVSYWRGQVYPSCPVSHQLTQFDEESYAAALRERKNKKGTVYPLQAWAGEPVFGQISPFSLQARFGINRHPLKLKAVGIPKVFVAGRTNIVAKSWDAFCNRASKPPKFKSRRNPVQSLISINSQATSIEGDRIRIPNLGFAKAKGLSKRWPTGAVVSTLKIIKAADGWYLQLTGEVGERKPPKLTGRHVGIDPGAVRHHTTDSGSFVEPPRYLLKAAQKLRMLQRQLSRQYRQNSTQIFGKDGRVIRSVARSDWDRKNFDKTKAKIAKLHAKIARQRRAFNHFQSSKYAAMFDVITVEDFEPAKLTRAVKKGEAGVRNGRKAKSGLNRNLLDNAIGQFYGMLEQKSKDRGRLFQRVKPAFSSQTCNCCGYRSKDNRQSQSSFVCLSCGHRDNADRNAARNIKRMAELGIDRLTFTDDFADGFRERVGVDGAKDVVSLPKKAKKRGSRKSTMEVPCQLTLDEGMFK

SEQ ID NO: 674 - protein, 524 aa, Unknown
  Description of Unknown: soil crust metagenome sequence
MKTLEFKLYLTRSQQETIDNWLSALKYPWNKGVELIHTFNDFNYYDKRFKTLAPCCPIASYNHKLRIVNAKNREKKQQLRENEYLSCPIGWKLDDYTGFSTSLETRELMQVLVDEGKTLEKVGTRSPYGIYPIRPFASGKLVTNLSYFELLSVFAHKRNVDRPWFIDADEPWFTDVDSKIIAGMVKTLADSWQAFLDGKRKPPKFKGKNKRIDTLINNNSKDIRVEGDRIKLPKIGFVRAKGLAKRWNQGLVFCPMKICRKASGYYLQLTGEVPPEPLKKHPKLKAVGLDPGIAAVYTDDAGRTVKVPPYLEKDLGKLKSLQRKVQRQWENNKDIPEWERKNWQKTQNKIAKLHEKIARRGRAFNHFESTKLVRQFEEIYLEDYRPSEMVGKVKPIDSGKVVVNTKDELTTVYEKNGRGVNKLINRATLRNRVGQLWQMIETKGGKRVLRVERNGTSSECPKCGDIKEKLIQQRIHRCGECGYITHRDRAAAQIIKQRGLEIRQAGGDEDNGKKQRQRRDRKKG

SEQ ID NO: 675 - protein, 516 aa, Unknown
  Description of Unknown: soil crust metagenome sequence
MKTLEFKLYLTDSQQQIVDEWLAALKFVWNKGVELMEDFKAFNHYDKRFKATAPCCPIVSYERKLRQVLPTCPVGWRLDDYSGLYHTKNEQGEWELVQVVMDEDKLLDKLVEKRSPNGIFPMRPWRNGKMLTGITHYGLEPIFAHKRNTDKPWLTAVDSKFISGMVKSLADGWTAFLGGSRDRPPKFKNKSVRINTLIHNNTKPDKSGRAVAPISGDRIRIPKIGWVRVKGLSKRWPKGLEFCPLKICRKASGYYLQLTGDVKNDILIKPPSVQAIGLDPGIEAVFTDDVGRRIKVPDYLERDLKKLKQLQRKASRQWEANKECEEWHRKNWRKTQDKIAKLHEKIARRGRAFNHFQSTKLVRIFNEIYLEDYRPSEMVGKVEPVDSGKLVINKNEDLTTVYEKNGREVNRAINRATLRNRVGQLWQMIETKGGKRVLRVERDGTSSECPRCGYVKQKRIQERTHRCEQCGYKAHRDQAAAEVIKKKGQEARLKGCVEQENTKQRRKGRGKKVSGE

SEQ ID NO: 676 - protein, 502 aa, Unknown
  Description of Unknown: soil crust metagenome sequence
MIDRQGRQQCRLKLMKTIEFKLSLTRSQEEILNQWMSALKFVWNLGVALIKEFNSFNHYDKRFKQSAPCCPIVAYNHKLRVTNGATQEGWRECEFPIQPIGFQLLAFDEENPIDVGKRTPCGVYPVIVNGHAVKNLTYFGIQGAFAHKRNQDKPWLTCIPSKFVHGTVQSLADSWQAFLSGNSKRPKFKGKNDQIKTLVTNNAKDITTIKGDRIRIPNLGYVRAKGLSKRWHEGVPICSLKICKKASGYYLQLTGDIEACSPKKTKIPKVQAVGLDPGIEHVYCDDAGRKVKVPQYLERDLQKLKQLQRKAQKQWDMNKDTVDQNGEPWQKKNWRRTQDKIAKLHERIARRGRAFNHFQSTKLVRQFQQIYLEDYKPSEVIKKVAPVDSGKMVVNKNDELTTIYEKNERFLNRSTNRAAQRNRVGQLWTMIKTKGGKKVVLVEAAGTSDECPSCGHVEEKTLRQRLHRCKNCGFVAHRDVAAAKIIKKRGMAQSPQMDVSLR

SEQ ID NO: 677 - protein, 509 aa, Unknown
  Description of Unknown: soil crust metagenome sequence
MYLTDSQQQIVDEWLAALKFVWNKGVELMEDFKAFNHYDKRFKATAPCCPIVSYERKLRQVLPTCPVGWRLDDYSGLYHTKNEQGEWELVQVVMDEDKLLDKLVEKRSPNGIFPMRPWRNGKMLTGITHYGLEPIFAHKRNTDKPWLTAVDSKFISGMVKSLADGWTAFLGGSRDRPPKFKNKSVRINTLIHNNTKPDKSGRAVAPISGDRIRIPKIGWVRVKGLSKRWPKGLEFCPLKICRKASGYYLQLTGDVKNDILIKPPSVQAIGLDPGIEAVFTDDVGRRIKVPDYLERDLKKLKQLQRKASRQWEANKECEEWHRKNWRKTQDKIAKLHEKIARRGRAFNHFQSTKLVRIFNEIYLEDYRPSEMVGKVEPVDSGKLVINKNEDLTTVYEKNGREVNRAINRATLRNRVGQLWQMIETKGGKRVLRVERDGTSSECPRCGYVKQKRIQERTHRCEQCGYKAHRDQAAAEVIKKKGQEARLKGCVEQENTKQRRKGRGKKVSGE

SEQ ID NO: 678 - protein, 516 aa, Unknown; identical to SEQ ID NO: 675
  Description of Unknown: soil crust metagenome sequence

SEQ ID NO: 679 - protein, 524 aa, Unknown; identical to SEQ ID NO: 674
  Description of Unknown: soil crust metagenome sequence

SEQ ID NO: 680 - protein, 685 aa, Unknown
  Description of Unknown: soil metagenome sequence
MDKSKRQGEVAEKQLRESLPQKRSIRGAFLFDKMKACQAEAQRIVKMLTLEFSVEFTPEQESIISQWMDLQKIQWNIGLSALLEFDATRRWNKLTDSDGGKGAYYPVCAIAGGDWVPASAWGYEAIPRNDGQEPLKGWTARACPLYKVGVGDRWLSGGCTIPEIGAMVPNVEPLLLSIKDAKSPGGLSIMARADNIPSDLAETPSLFRHGTLALLFASWDRHKSDPLNAGQPKRKRYQDKWDVLYTGNAKELSKTSDAVRIPKIGWVGIPKLSDRWRDSEGNAPDICSFKIVRRDRKFRVQLTGDLKRSYKAQPSNLSVGVDLGFVYAHIESNGNRSALLDLSLEKLEQRKQRLQAKLDSKLDQRIVLWLRNPETTHASLIVRRKTRRGIEEEKPMIRISLENWEKLKQCRTAGEAAQIIGQKRDKRYQTLRHALPKSAKEQALRVQIASIDRKIAATRKTRDAKLATRLAKKYGHIAIENGLQREVKRHRPDPKKQGDKYLKNGAERQSETNKQLKALAPGRKIAMLEAMSKRYGRDFSKQESPTTTTECPCCGRHNEPSLKMDEHGDRRYSCACGWEIDQDVNAATNIELRSSALKPEVQLSQPAETARIRSYQLEADGKLFAEPQWRMPPAPPKAKKESRGKRRKALRDSEPLKELKGQRLTAASRKSQVKALESGVSKMLP

SEQ ID NO: 681 - protein, 685 aa, Unknown
  Description of Unknown: soil metagenome sequence
MDKSKRQGEVAEKQLRESLPQKRSIRGAFLFDKMKACQAEAQRIVKMLTLEFSVEFTPEQESIISQWMDLQKIQWNIGLSALLEFDATRRWNKLTDSDGGKGAYYPVCAIAGGDWVPASAWGYEAIPRNDGQEPLKGWTARACPLYKVGVGDRWLSGGCTIPEIGAMVPNVEPLLLSIKDAKSPGGLSIMARADNIPSDLAETPSLFRHGTLALLFASWDRHKSDPLNAGQPKRKRYQDKWDVLYTGNAKELSKTSDAVRIPKIGWVGIPKLSDRWRDSEGNAPDICSFKIVRRDRKFRVQLTGDLKRSYKAQPSNLSVGVDLGFVYAHIESNGNRSALLDLSLEKLEQRKQRLQAKLDSKLDQRIVLWLRNPETTHASLIVRRKTRRGIEEEKPMIRISLENWEKLKQCRTAGEAAQIIGQKRDKRYQTLRHALPKSAKEQALRVQIASIDRKIAATRKTRDAKLATRLAKKYGHIAIENGLQREVKRHRPDPKKQGDKYLKNGAERQSETNKQLKALAPGRKIAMLEAMSKRYGRDFYKQESPTTTTECPCCGRHNEPSLKMDEHGDRRYSCACGWEIDQDVNAATNIELRSSALKPEVQLSQPAETARIRSYQLEADGKLFAEPQWHMPPAPPKAKKESRGKRRKALRDSEPLKELKGQRLTAASRKSQVKALESGVSKMLP

SEQ ID NO: 682 - protein, 626 aa, Sphaerospermopsis reniformis
MKTIKIKVSLSTQQKEIFNQYIDQLEWFWNLALANQFHNHCIKWYEWAKKQQQLLDKTKENFDKLKPEQKQLVLDFYSHKYGEKQPKLTEKQKDLINKFEIFSRWLPFDLDGIIPVPLLLGNSGYEGLSCRIAIGGPRWVRDENINIPLKNKKGEIIHKKGSKLVPGKHPYQPIKPTPHSYKTFPGGKFAGRELVDVKKLDNLDGLNSIRSAENLPPLTVPTDYIGGTMKFFEVSWNAFLDPKLPERRKVKFKDKERKLTTLSNNQKPPNRINPEKNTVSISGIGEVKVIDRNWLQRLNLENISPRTYTLSKKPSGYYLNIVVAHPLQEEKSKLDKQLPKVKKEYGEESQEYQEILSKYNEVSEQIKSSYFDDVKDLSVGIDPGVNAVISTDHGALFMPNITRERISIHIEELQSKLNKIKDINDAQWKAAGNKGERPKTKNEIKLQAQISRLHEKGANSANCFNHKLSTRIARTYRYVCWEDTKIKNLLKQVEPQALPEGVGYAHNGASAKRGLNWIMRQRCLSDLEAKTKEKVEKKGGKFNEPSANYSSQLCHCCQQKGERVSQHEFICKNPECSLFEKVQQADVNAARNHKQHGGFEVGEVKYNLTKLQYQKPKRFKKKKLTK

SEQ ID NO: 683 - DNA, 37 bp, Artificial Sequence
  Description of Artificial Sequence: Synthetic oligonucleotide
cttgcaactgggcttggggactgaggatagttgaaac

SEQ ID NO: 684 - DNA, 36 bp, Artificial Sequence
  Description of Artificial Sequence: Synthetic oligonucleotide
gttaggatgcccgcaggatgtcatatagttggcaag

SEQ ID NO: 685 - DNA, 37 bp, Artificial Sequence
  Description of Artificial Sequence: Synthetic oligonucleotide
attgcaataaattttaattcttagcagggattgaaag

SEQ ID NO: 686 - DNA, 35 bp, Artificial Sequence
  Description of Artificial Sequence: Synthetic oligonucleotide
tgcaataaattttaattcttagcagggattgaaag

SEQ ID NO: 687 - DNA, 37 bp, Artificial Sequence
  Description of Artificial Sequence: Synthetic oligonucleotide
cttgaaattccttttaatgcctatcaggaattgaaac

SEQ ID NO: 688 - DNA, 36 bp, Artificial Sequence
  Description of Artificial Sequence: Synthetic oligonucleotide
gttcccaatagggggacttctcgatccaatagaaag

SEQ ID NO: 689 - DNA, 36 bp, Artificial Sequence
  Description of Artificial Sequence: Synthetic oligonucleotide
gttgccaagagggcgacttctaaggttgatgggaag

SEQ ID NO: 690 - DNA, 37 bp, Artificial Sequence
  Description of Artificial Sequence: Synthetic oligonucleotide
cttgcaagaagggcggagggatgagaggtgttgaaac

SEQ ID NO: 691 - DNA, 37 bp, Artificial Sequence
  Description of Artificial Sequence: Synthetic oligonucleotide
cttgcaagaagggcggagggacaggagggactgaaac

SEQ ID NO: 692 - DNA, 35 bp, Artificial Sequence
  Description of Artificial Sequence: Synthetic oligonucleotide
cgcaatagacgattgcctattttatggattgaaac

SEQ ID NO: 693 - DNA, 38 bp, Artificial Sequence
  Description of Artificial Sequence: Synthetic oligonucleotide
cttgcaactaagactggggactgaggatagttgaaact

SEQ ID NO: 694 - DNA, 37 bp, Artificial Sequence
  Description of Artificial Sequence: Synthetic oligonucleotide
cttgcaactaagactggggactgaggatagttgaaac

SEQ ID NO: 695 - DNA, 37 bp, Artificial Sequence
  Description of Artificial Sequence: Synthetic oligonucleotide
gttccaattaatcttaagtcctattagggattgaaac

SEQ ID NO: 696 - DNA, 36 bp, Artificial Sequence
  Description of Artificial Sequence: Synthetic oligonucleotide
ccaacagatggctagagttgtctaggcagttgaagg

SEQ ID NO: 697 - DNA, 37 bp, Artificial Sequence
  Description of Artificial Sequence: Synthetic oligonucleotide
cccgcaatagacgattgcctattttatggattgaaac

SEQ ID NO: 698 - DNA, 37 bp, Artificial Sequence
  Description of Artificial Sequence: Synthetic oligonucleotide
cttgcaataaactttaatccttagtagggattgaaac

SEQ ID NO: 699 - DNA, 21 bp, Artificial Sequence
  Description of Artificial Sequence: Synthetic oligonucleotide
tttcaatccctaccaagggtt

SEQ ID NO: 700 - DNA, 37 bp, Artificial Sequence
  Description of Artificial Sequence: Synthetic oligonucleotide
attgcaatatattttgatccttggtagggattgaaag

SEQ ID NO: 701 - DNA, 37 bp, Artificial Sequence
  Description of Artificial Sequence: Synthetic oligonucleotide
cttgcaactgggcttagggactgaggatagttgaaac

SEQ ID NO: 702 - DNA, 31 bp, Artificial Sequence
  Description of Artificial Sequence: Synthetic oligonucleotide
atgacatctgggggttggaaggggttgcaag

SEQ ID NO: 703 - DNA, 30 bp, Artificial Sequence
  Description of Artificial Sequence: Synthetic oligonucleotide
gttgccaagagggtgactaattgggttaag

SEQ ID NO: 704 - DNA, 21 bp, Artificial Sequence
  Description of Artificial Sequence: Synthetic oligonucleotide
ctgataaagtttttgggtact

SEQ ID NO: 705 - DNA, 37 bp, Artificial Sequence
  Description of Artificial Sequence: Synthetic oligonucleotide
gtcaccatgacatctggaggttggcaggggttgcaag

SEQ ID NO: 706 - DNA, 37 bp, Artificial Sequence
  Description of Artificial Sequence: Synthetic oligonucleotide
gctgaaaccaaactaatccgctcttagggattgaaag

SEQ ID NO: 707 - DNA, 38 bp, Artificial Sequence
  Description of Artificial Sequence: Synthetic oligonucleotide
cgatcaaaggactaatcccggcgatcgggactgaaact

SEQ ID NO: 708 - DNA, 36 bp, Artificial Sequence
  Description of Artificial Sequence: Synthetic oligonucleotide
ccgacaaacgactagagttgtctaggcagttgaagg

SEQ ID NO: 709 - DNA, 37 bp, Artificial Sequence
  Description of Artificial Sequence: Synthetic oligonucleotide
ctcgcaatagacgattgcctattttatggattgaaac

SEQ ID NO: 710 - DNA, 18 bp, Artificial Sequence
  Description of Artificial Sequence: Synthetic oligonucleotide
gtcgcaatctggctggat

SEQ ID NO: 711 - DNA, 34 bp, Artificial Sequence
  Description of Artificial Sequence: Synthetic oligonucleotide
ctttcaagttaactctgtagagacggtttgaaag

SEQ ID NO: 712 - DNA, 37 bp, Artificial Sequence
  Description of Artificial Sequence: Synthetic oligonucleotide
gtttcttattaatgaatcctagcaatgggattgaaac

SEQ ID NO: 713 - DNA, 21 bp, Artificial Sequence
  Description of Artificial Sequence: Synthetic oligonucleotide
tggcggtactggtggtactgg

SEQ ID NO: 714 - DNA, 37 bp, Artificial Sequence
  Description of Artificial Sequence: Synthetic oligonucleotide
gtagaaaccaacagggtttctggaaagggattgaaag

SEQ ID NO: 715 - DNA, 36 bp, Artificial Sequence
  Description of Artificial Sequence: Synthetic oligonucleotide
gttcccatcgtactgacttctctggtcgttcccgac

SEQ ID NO: 716 - DNA, 36 bp, Artificial Sequence
  Description of Artificial Sequence: Synthetic oligonucleotide
gttgccaacagggcgacttcattggttaatgggaag

SEQ ID NO: 717 - DNA, 37 bp, Artificial Sequence
  Description of Artificial Sequence: Synthetic oligonucleotide
ctcgaaattcctattaatgcctatcaggaattgaaac

SEQ ID NO: 718 - DNA, 37 bp, Artificial Sequence
  Description of Artificial Sequence: Synthetic oligonucleotide
ctttctatcagagtgagaagtccccctgttgggaact

SEQ ID NO: 719 - DNA, 37 bp, Artificial Sequence
  Description of Artificial Sequence: Synthetic oligonucleotide
ctcgcaataggtgattgcctgttttaagaattgaaac

SEQ ID NO: 720 - DNA, 37 bp, Artificial Sequence
  Description of Artificial Sequence: Synthetic oligonucleotide
ctcgcaataggtgattacctgttttaaggattgaaac

SEQ ID NO: 721 - DNA, 37 bp, Artificial Sequence
  Description of Artificial Sequence: Synthetic oligonucleotide
gttgcaatggctgaaacccggtttacgggactgaaac

SEQ ID NO: 722 - DNA, 30 bp, Artificial Sequence
  Description of Artificial Sequence: Synthetic oligonucleotide
ctcgcaataggtgattacctgttttaagga

SEQ ID NO: 723 - DNA, 17 bp, Artificial Sequence
  Description of Artificial Sequence: Synthetic oligonucleotide
gcgatcgggactgaaac

SEQ ID NO: 724 - DNA, 28 bp, Artificial Sequence
  Description of Artificial Sequence: Synthetic oligonucleotide
cgactagagttgtctaggcagttgaagg

SEQ ID NO: 725 - DNA, 36 bp, Artificial Sequence
  Description of Artificial Sequence: Synthetic oligonucleotide
ctgacaggtgactagagttgtctaggcagttgaagg

SEQ ID NO: 726 - DNA, 37 bp, Artificial Sequence
  Description of Artificial Sequence: Synthetic oligonucleotide
ggcgcaatcgacttaagcccttagcagggattgaaac

SEQ ID NO: 727 - DNA, 37 bp, Artificial Sequence
  Description of Artificial Sequence: Synthetic oligonucleotide
gttcaaatagcctttaatccttcgtaggggttgaaag

SEQ ID NO: 728 - DNA, 29 bp, Artificial Sequence
  Description of Artificial Sequence: Synthetic oligonucleotide
cgtcttgcccgtgcgcgtgtggggtgatc

SEQ ID NO: 729 - DNA, 22 bp, Artificial Sequence
  Description of Artificial Sequence: Synthetic oligonucleotide
aaagcctatcaggtattgaaag

SEQ ID NO: 730 - DNA, 37 bp, Artificial Sequence
  Description of Artificial Sequence: Synthetic oligonucleotide
gttgaaataagcctgaatgcctatcaggtattgaaag

SEQ ID NO: 731 - DNA, 33 bp, Artificial Sequence
  Description of Artificial Sequence: Synthetic oligonucleotide
ggtttcttcagttgcctcggcttcaggttcagc

SEQ ID NO: 732 - DNA, 37 bp, Artificial Sequence
  Description of Artificial Sequence: Synthetic oligonucleotide
ctagcaataacattcatcccctggcagggattgaaag

SEQ ID NO: 733 - DNA, 41 bp, Artificial Sequence
  Description of Artificial Sequence: Synthetic oligonucleotide
tctagcaataacattcatcccctggcagggattgaaagggc

SEQ ID NO: 734 - DNA, 37 bp, Artificial Sequence
  Description of Artificial Sequence: Synthetic oligonucleotide
gtttctagaagttctgaggactgattgttgtttaaac

SEQ ID NO: 735 - DNA, 779 bp, Unknown
  Description of Unknown: aquatic-freshwater sequence
gctggggaatagcggttatgaaggtttatcctgtcagatagccacaggtgggaactactggaagagagacgaaaatatcaacatcccaattaataccaagaaaggtattattcacgttaaaggatacaaattagttaagggtgataaacttttatttgacattccccagcaagctgatactaacgctgctagaaatcataagcaaaatggtggttttgaactgggagaggtcaaatatcataatgttaagctagtttatcaaaagcctaaaagatttaagaaaaaacgcttgacaaagtaataagattaggctaatattaaattaccgcagtttgggcgggcagctaataatattagcttatgacttctaaggcttttgcctaaaaagtaagggggaaggcgacaacccccaaagaccagccggaactatggctggcaactataccctctcttttggcatatcaaagctagggcaaaaaccccagacattcgccaaaagcccagaaccatgacattgcaagagtttcgcccagtttcttttaaagattcaagctgatttaagcggctgaaatgagattttttaatgtgtaatcgtctagcctgggaacatatatgcaacttgcaattaactcagttcctcaagtccggtttcacctattacctaatagataggcacgccacaggagacaattcccttgcaattaactcagttccccaagtccggtttcaccaatgaccaggtgcgcgatcgcaccccacaagagcaaacttgcaattaa

SEQ ID NO: 736 - DNA, 1584 bp, Unknown
  Description of Unknown: aquatic-freshwater-lake sequence
aattatgtctccgtttgctacttgcttaaacagtttagatatgttgggcttatctccccagtaacagccaaactccaaagatagcttttcaagttcagctttttcttcctcggatatagagagcgtgatactctcttgttttctagtcataatgttattttagcctagcctctcttgtctctatatccctataatatccttatagttttccagtgccaaccctaaagtatacggaattttgcaattgtttaattgttgtataaataacttgctatgatgctatactaataactcggttgtcacctgtgcaataccgtctgcctaatcagcagacatttattaatctactaattgtcaataagtaataagaacccagtggttaaaatgacgggttctgtggctgttttcaaacaagattatttgtctacattgtttacattgtctgacattattgtcttacaaaagaaagcaggaattggttgaaacatgactggggtaaagatttggggtgtatgcaactatcagttaatgtctaatttttaatataaaaaatatttttaaattaccaaatttgtgctatcctaaataaataccaaaaaacgcggttagtaccaataaccacgtttctattaccaggtacttagccgctagtttgggggaacggcaactaacaatatagcacaaaacagctatttacatcaacaccaattgacaaaaacaacaggaagacgacggacatgaagacaattaagattaaaatcaaactctcatcagaacaggcggctgtgtgcgatcgctacttagatgaattaacatggctgtggaatttagcactttctaaccaactacacaatcactgcgtagattggtatgcttgggctgctaaattatttgacgttgcccaacaagctgataccaatgctgctagaaatcataaacagaatggtggttttgaattgggagaggtcaaataccataatgttaggctggtttatcaaaagcctaaaagatttaagaaaaaacgcttgacaaagtaataggactaggttaatattaaattaccgcagtttggacgggtagctaatgtaatgttagcttatgacttgtaagggttttaccctaaaaagtaagggggaaggcgacgacccccaaagaccagccggaactatggctggcaactatctcatctttttggcatatcaaagctagggtaaaaaccctggacattcgccaaaagtccagaaccatgacattgcaagagtttcgctcagttttcttgcgactgggcttagagactgaggatagttgaaactcgctcagtttcttttaaagacctaagctgatttaagcggctgaaatgagattttttagcaggtccgccagaattgcctttgaaacccttgacttataaagctcttgaaagccgggaaaaccggacttgaggaactgggttaattgcaaggcaaagaatcaaagcaagacaaagaaacgctgaaacagaatttaatactttaacttacataactcccatcccaaatacatagcatgggagttttgcaaccctggacaatctctcattatttc

SEQ ID NO: 737 - DNA, 1622 bp, Unknown
  Description of Unknown: aquatic-freshwater sequence
ggcattttctaccttgcaagaaagttaaaagctgtcccggtgaaagggattgggtgtaaagtttcaggaattgatattatttttgccattaaagggattgattgtagttgtgtgtggaatccatcgtttttattaatccaatatctttaatggctatttttatccagagtcaggttttccagctatggaaaatccacaagtggaaaaaccacaagtggaaaatctgctatataataaatatctattccaataagtatttaattaaataagtatttaagaaaaaagaagtatttacgctttctctcattaaagaggatttaagaaaagaactaacacaacagatatctgttattcttgacttaaagacaaatatttctctcaagcagataaatctctcataggatcaggttatgcccgcccgttgcgcttaaacactattacacaaaaagcgaatagattttgtttgagaatttataaagcaattttaaagcgtacttattgcataaataaaaaatacccactaacacgctttagtgggtatcaggttgaaacctacaatgcaattgtaataactatgtttcctggtttataaatatagtccatcttattttttgtttactgtcaagtggttttaaaaaatatttgttttgtttgtttgcctgtattaattaaattattaataaatcacttaatatttatctacttatgctatcattaataagtacccaaaaacgtgattattcaaagtaatcacgtttttattaccaggtacttagtcgctagtttggataacgaccttgacataatagcatgaaaacaatcaaaatcaaaatcaaactcaccactgatcaggtgcaactgtgcgatcgctatttggaagaattgacatggctgtggaatttaacactttctaatcaactacataatcactgtgtgacgtggtacgattgggcggctaaatttgatattccccagcaagctgatactaacgctgctagaaatcataagcagaatggtggttttgaactgggagaggtcaagtatcataatgttaagctagtttatcaaaagcctaaaagatttaagaaaaaacgcttgacaaaccaataggattaggttaatattaaattaccgcagtttgggcgggttgctaataatattagcttatgacttctaaggcttttgcctaaaaagtaagggggaaggcgacaacccccaaagaccagccggaactatggctggcaactatctcatctttttggcatatcaaagctagggcaaaaaccccagacattcgccaaaagcccagaaccatgacattgcaagagtttcgcccagtttcttttaaagacccaagctgatttaagcggctgaaatgagattttttaacaggtccgccaaaatcgcttctgaaacccttgatttataaagcctttaaaccccggggaaacgaagcgaaatgaaactttgaactaaggacggaacatctgaatcaaactcagttccaatttaaacactttctcacttgatggtgtccacttaaacgtttcgcaacaatacaaagtggaattaaagtagaaaggcttacctaaattattggttaaaaaagtatcaatctctga

SEQ ID NO: 738 - DNA, 1140 bp, Unknown
  Description of Unknown: freshwater metagenome sequence
ccctgcctttggaatccttactgtgattgggttctggaagcagtttgcgaggttcaattcaaaaagtccatttcagccgctgagatgtgcttgtaatctacctctaatccttacgtggtaaggctgcgaggttcgtttgatggtgtgccatgtttccggcacatctatgtaggttgtcaccttcctacttactcccggttaagagagtctttgtacctggacaccagataatcccgccagaactgcggtacaaaactattataacacagattttggagttgtgtgtagtttgtcaaaaatagttaaaattaatctgttattggattagacactagtttatttttatgttttatccccctgcctttggaatccttgctgtgattgggttctaaaaccagtttgcgaggttcaattcaaaaagtccatttcagccgctgagatgtgcttgtaatctacctctaatccttacgtggtaaggctgcgaggttcgttagatggtgtgccattattccggcacatctatgtaggttgtcaccttcctacttactcccagttaagagagtctttgtacctggacaccaggtaattccgccagaactgcggtacaaaactagtatagcataaattttggagttgtgttataattttaaaaaatcagtagcaggtgaccataatgaagacgatttgtatcaaggtaaagttatcgccagaacaggagagagagtttagtaatgccactcaagaactggagtggatatggaatttcagtttaaagacgtatatacataaccactgtgtaaagtggtatgaatgggctacgggggagctaggagaggtcaaataccataatttaagcctagaatataatgtttccgcacgttggaaacatagaaataggaacaaggtaaaacccgttgtttccgttactaagctgcctaccacaagcactcccgttcctaataaacctaaatgaactaagttattgacaatatgagttatcaatttaaatcatctaccgccaatcccgtgtttttccggacttatagccgtttgactccagatggtagggaatcatggcaagatgtgtgtaaacgcaccatatctggtatgtctgaactaggacgttttacaccagaggaa

SEQ ID NO: 739 - DNA, 120 bp, Artificial Sequence
  Description of Artificial Sequence: Synthetic polynucleotide
gacagtaaacaaaaaataagatggactatatttataaaccaggaaacatagttattacaattgcattgtaggtttcaacctgatacccactaaagcgtgttagtgggtattttttattta

SEQ ID NO: 740 - DNA, 116 bp, Artificial Sequence
  Description of Artificial Sequence: Synthetic polynucleotide
aaacaaaaaataagatggactatatttataaaccaggaaacatagttattacaattgcattgtaggtttcaacctgatacccactaaagcgtgttagtgggtattttttatttatg

SEQ ID NO: 741 - DNA, 269 bp, Artificial Sequence
  Description of Artificial Sequence: Synthetic polynucleotide
aatattaaattaccgcagtttgggcgggttgctaataatattagcttatgacttctaaggcttttgcctaaaaagtaagggggaaggcgacaacccccaaagaccagccggaactatggctggcaactatctcatctttttggcatatcaaagctagggcaaaaaccccagacattcgccaaaagcccagaaccatgacattgcaagagtttcgcccagtttcttttaaagacccaagctgatttaagcggctgaaatgagatttttta

SEQ ID NO: 742 - DNA, 70 bp, Artificial Sequence
  Description of Artificial Sequence: Synthetic oligonucleotide
atattaaattaccgcagtttgggcgggttgctaataatattagcttatgacttctaaggcttttgcctaa

SEQ ID NO: 743 - DNA, 51 bp, Artificial Sequence
  Description of Artificial Sequence: Synthetic oligonucleotide
ttatccaaactagcgactaagtacctggtaataaaaacgtgattactttga

SEQ ID NO: 744 - DNA, 48 bp, Artificial Sequence
  Description of Artificial Sequence: Synthetic oligonucleotide
ccaaactagcgactaagtacctggtaataaaaacgtgattactttgaa

SEQ ID NO: 745 - DNA, 70 bp, Artificial Sequence
  Description of Artificial Sequence: Synthetic oligonucleotide
aaattaccgcagtttgggcgggcagctaataatattagcttatgacttctaaggcttttgcctaaaaagt

SEQ ID NO: 746 - DNA, 70 bp, Artificial Sequence
  Description of Artificial Sequence: Synthetic oligonucleotide
ttaaattaccgcagtttgggcgggcagctaataatattagcttatgacttctaaggcttttgcctaaaaa

SEQ ID NO: 747 - DNA, 92 bp, Artificial Sequence
  Description of Artificial Sequence: Synthetic oligonucleotide
ctgaaatgagattttttaatgtgtaatcgtctagcctgggaacatatatgcaacttgcaattaactcagttcctcaagtccggtttcaccta

SEQ ID NO: 748 - DNA, 90 bp, Artificial Sequence
  Description of Artificial Sequence: Synthetic oligonucleotide
atgagattttttaatgtgtaatcgtctagcctgggaacatatatgcaacttgcaattaactcagttcctcaagtccggtttcacctatta

SEQ ID NO: 749 - DNA, 115 bp, Artificial Sequence
  Description of Artificial Sequence: Synthetic polynucleotide
cccagacattcgccaaaagcccagaaccatgacattgcaagagtttcgcccagtttcttttaaagattcaagctgatttaagcggctgaaatgagattttttaatgtgtaatcgt

SEQ ID NO: 750 - DNA, 108 bp, Artificial Sequence
  Description of Artificial Sequence: Synthetic polynucleotide
ccccagacattcgccaaaagcccagaaccatgacattgcaagagtttcgcccagtttcttttaaagattcaagctgatttaagcggctgaaatgagattttttaatgt

SEQ ID NO: 751 - DNA, 37 bp, Artificial Sequence
  Description of Artificial Sequence: Synthetic oligonucleotide
gtttcaactatcctcagtccccaagcccagttgcaag

SEQ ID NO: 752 - DNA, 36 bp, Artificial Sequence
  Description of Artificial Sequence: Synthetic oligonucleotide
cttgccaactatatgacatcctgcgggcatcctaac

SEQ ID NO: 753 - DNA, 37 bp, Artificial Sequence
  Description of Artificial Sequence: Synthetic oligonucleotide
ctttcaatccctgctaagaattaaaatttattgcaat

SEQ ID NO: 754 - DNA, 35 bp, Artificial Sequence
  Description of Artificial Sequence: Synthetic oligonucleotide
ctttcaatccctgctaagaattaaaatttattgca

SEQ ID NO: 755 - DNA, 37 bp, Artificial Sequence
  Description of Artificial Sequence: Synthetic oligonucleotide
gtttcaattcctgataggcattaaaaggaatttcaag

SEQ ID NO: 756 - DNA, 36 bp, Artificial Sequence
  Description of Artificial Sequence: Synthetic oligonucleotide
ctttctattggatcgagaagtccccctattgggaac

SEQ ID NO: 757 - DNA, 36 bp, Artificial Sequence
  Description of Artificial Sequence: Synthetic oligonucleotide
cttcccatcaaccttagaagtcgccctcttggcaac

SEQ ID NO: 758 - DNA, 37 bp, Artificial Sequence
  Description of Artificial Sequence: Synthetic oligonucleotide
gtttcaacacctctcatccctccgcccttcttgcaag

SEQ ID NO: 759 - DNA, 37 bp, Artificial Sequence
  Description of Artificial Sequence: Synthetic oligonucleotide
gtttcagtccctcctgtccctccgcccttcttgcaag

SEQ ID NO: 760 - DNA, 35 bp, Artificial Sequence
  Description of Artificial Sequence: Synthetic oligonucleotide
gtttcaatccataaaataggcaatcgtctattgcg

SEQ ID NO: 761 - DNA, 38 bp, Artificial Sequence
  Description of Artificial Sequence: Synthetic oligonucleotide
agtttcaactatcctcagtccccagtcttagttgcaag

SEQ ID NO: 762 - DNA, 37 bp, Artificial Sequence
  Description of Artificial Sequence: Synthetic oligonucleotide
gtttcaactatcctcagtccccagtcttagttgcaag

SEQ ID NO: 763 - DNA, 37 bp, Artificial Sequence
  Description of Artificial Sequence: Synthetic oligonucleotide
gtttcaatccctaataggacttaagattaattggaac

SEQ ID NO: 764 - DNA, 36 bp, Artificial Sequence
  Description of Artificial Sequence: Synthetic oligonucleotide
ccttcaactgcctagacaactctagccatctgttgg

SEQ ID NO: 765 - DNA, 37 bp, Artificial Sequence
  Description of Artificial Sequence: Synthetic oligonucleotide
gtttcaatccataaaataggcaatcgtctattgcggg

SEQ ID NO: 766 - DNA, 37 bp, Artificial Sequence
  Description of Artificial Sequence: Synthetic oligonucleotide
gtttcaatccctactaaggattaaagtttattgcaag

SEQ ID NO: 767 - DNA, 21 bp, Artificial Sequence
  Description of Artificial Sequence: Synthetic oligonucleotide
aacccttggtagggattgaaa

SEQ ID NO: 768 - DNA, 37 bp, Artificial Sequence
  Description of Artificial Sequence: Synthetic oligonucleotide
ctttcaatccctaccaaggatcaaaatatattgcaat

SEQ ID NO: 769 - DNA, 37 bp, Artificial Sequence
  Description of Artificial Sequence: Synthetic oligonucleotide
gtttcaactatcctcagtccctaagcccagttgcaag

SEQ ID NO: 770 - DNA, 31 bp, Artificial Sequence
  Description of Artificial Sequence: Synthetic oligonucleotide
cttgcaaccccttccaacccccagatgtcat

SEQ ID NO: 771 - DNA, 30 bp, Artificial Sequence
  Description of Artificial Sequence: Synthetic oligonucleotide
cttaacccaattagtcaccctcttggcaac

SEQ ID NO: 772 - DNA, 21 bp, Artificial Sequence
  Description of Artificial Sequence: Synthetic oligonucleotide
agtacccaaaaactttatcag

SEQ ID NO: 773 - DNA, 37 bp, Artificial Sequence
  Description of Artificial Sequence: Synthetic oligonucleotide
cttgcaacccctgccaacctccagatgtcatggtgac

SEQ ID NO: 774 - DNA, 37 bp, Artificial Sequence
  Description of Artificial Sequence: Synthetic oligonucleotide
ctttcaatccctaagagcggattagtttggtttcagc

SEQ ID NO: 775 - DNA, 38 bp, Artificial Sequence
  Description of Artificial Sequence: Synthetic oligonucleotide
agtttcagtcccgatcgccgggattagtcctttgatcg

SEQ ID NO: 776 - DNA, 36 bp, Artificial Sequence
  Description of Artificial Sequence: Synthetic oligonucleotide
ccttcaactgcctagacaactctagtcgtttgtcgg

SEQ ID NO: 777 - DNA, 37 bp, Artificial Sequence
  Description of Artificial Sequence: Synthetic oligonucleotide
gtttcaatccataaaataggcaatcgtctattgcgag

SEQ ID NO: 778 - DNA, 18 bp, Artificial Sequence
  Description of Artificial Sequence: Synthetic oligonucleotide
atccagccagattgcgac

SEQ ID NO: 779 - DNA, 34 bp, Artificial Sequence
  Description of Artificial Sequence: Synthetic oligonucleotide
ctttcaaaccgtctctacagagttaacttgaaag

SEQ ID NO: 780 - DNA, 37 bp, Artificial Sequence
  Description of Artificial Sequence: Synthetic oligonucleotide
gtttcaatcccattgctaggattcattaataagaaac

SEQ ID NO: 781 - DNA, 21 bp, Artificial Sequence
  Description of Artificial Sequence: Synthetic oligonucleotide
ccagtaccaccagtaccgcca

SEQ ID NO: 782 - DNA, 37 bp, Artificial Sequence
  Description of Artificial Sequence: Synthetic oligonucleotide
ctttcaatccctttccagaaaccctgttggtttctac

SEQ ID NO: 783 - DNA, 36 bp, Artificial Sequence
  Description of Artificial Sequence: Synthetic oligonucleotide
gtcgggaacgaccagagaagtcagtacgatgggaac

SEQ ID NO: 784 - DNA, 36 bp, Artificial Sequence
  Description of Artificial Sequence: Synthetic oligonucleotide
cttcccattaaccaatgaagtcgccctgttggcaac

SEQ ID NO: 785 - DNA, 37 bp, Artificial Sequence
  Description of Artificial Sequence: Synthetic oligonucleotide
gtttcaattcctgataggcattaataggaatttcgag

SEQ ID NO: 786 - DNA, 37 bp, Artificial Sequence
  Description of Artificial Sequence: Synthetic oligonucleotide
agttcccaacagggggacttctcactctgatagaaag

SEQ ID NO: 787 - DNA, 37 bp, Artificial Sequence
  Description of Artificial Sequence: Synthetic oligonucleotide
gtttcaattcttaaaacaggcaatcacctattgcgag

SEQ ID NO: 788 - DNA, 37 bp, Artificial Sequence
  Description of Artificial Sequence: Synthetic oligonucleotide
gtttcaatccttaaaacaggtaatcacctattgcgag

SEQ ID NO: 789 - DNA, 37 bp, Artificial Sequence
  Description of Artificial Sequence: Synthetic oligonucleotide
gtttcagtcccgtaaaccgggtttcagccattgcaac

SEQ ID NO: 790 - DNA, 30 bp, Artificial Sequence
  Description of Artificial Sequence: Synthetic oligonucleotide
tccttaaaacaggtaatcacctattgcgag

SEQ ID NO: 791 - DNA, 17 bp, Artificial Sequence
  Description of Artificial Sequence: Synthetic oligonucleotide
gtttcagtcccgatcgc

SEQ ID NO: 792 - DNA, 28 bp, Artificial Sequence
  Description of Artificial Sequence: Synthetic oligonucleotide
ccttcaactgcctagacaactctagtcg

SEQ ID NO: 793 - DNA, 36 bp, Artificial Sequence
  Description of Artificial Sequence: Synthetic oligonucleotide
ccttcaactgcctagacaactctagtcacctgtcag

SEQ ID NO: 794 - DNA, 37 bp, Artificial Sequence
  Description of Artificial Sequence: Synthetic oligonucleotide
gtttcaatccctgctaagggcttaagtcgattgcgcc

SEQ ID NO: 795 - DNA, 37 bp, Artificial Sequence
  Description of Artificial Sequence: Synthetic oligonucleotide
ctttcaacccctacgaaggattaaaggctatttgaac

SEQ ID NO: 796 - DNA, 29 bp, Artificial Sequence
  Description of Artificial Sequence: Synthetic oligonucleotide
gatcaccccacacgcgcacgggcaagacg

SEQ ID NO: 797 - DNA, 22 bp, Artificial Sequence
  Description of Artificial Sequence: Synthetic oligonucleotide
ctttcaatacctgataggcttt

SEQ ID NO: 798 - DNA, 37 bp, Artificial Sequence
  Description of Artificial Sequence: Synthetic oligonucleotide
ctttcaatacctgataggcattcaggcttatttcaac

SEQ ID NO: 799 - DNA, 33 bp, Artificial Sequence
  Description of Artificial Sequence: Synthetic oligonucleotide
gctgaacctgaagccgaggcaactgaagaaacc

SEQ ID NO: 800 - DNA, 37 bp, Artificial Sequence
  Description of Artificial Sequence: Synthetic oligonucleotide
ctttcaatccctgccaggggatgaatgttattgctag

SEQ ID NO: 801 - DNA, 41 bp, Artificial Sequence
  Description of Artificial Sequence: Synthetic oligonucleotide
gccctttcaatccctgccaggggatgaatgttattgctaga

SEQ ID NO: 802 - DNA, 37 bp, Artificial Sequence
  Description of Artificial Sequence: Synthetic oligonucleotide
gtttaaacaacaatcagtcctcagaacttctagaaac

SEQ ID NO: 803-899 - skipped (97 entries)

SEQ ID NO: 900 - DNA, 25 bp, Artificial Sequence
  Description of Artificial Sequence: Synthetic oligonucleotide
aaaggcgatgcgctgccattgctac

SEQ ID NO: 901 - DNA, 24 bp, Artificial Sequence
  Description of Artificial Sequence: Synthetic oligonucleotide
aagccatcgagcaagcattgatcc

SEQ ID NO: 902 - DNA, 37 bp, Artificial Sequence
  Description of Artificial Sequence: Synthetic oligonucleotide
cgtcgagatcatgaagccgtctcgctagcattgttgg

SEQ ID NO: 903 - DNA, 36 bp, Artificial Sequence
  Description of Artificial Sequence: Synthetic oligonucleotide
gtcgcatcttgaaaggcgatgcgctgccattgctac

SEQ ID NO: 904 - DNA, 37 bp, Artificial Sequence
  Description of Artificial Sequence: Synthetic oligonucleotide
ggtccgagttcatgcttgactcggcaaagattgcgac

SEQ ID NO: 905 - DNA, 36 bp, Artificial Sequence
  Description of Artificial Sequence: Synthetic oligonucleotide
gtcgaggacgcaatccgtcctcgcaagcgtgaatac

SEQ ID NO: 906 - DNA, 36 bp, Artificial Sequence
  Description of Artificial Sequence: Synthetic oligonucleotide
gttgcacctgttcggcgcactttcagttcgttgtac

SEQ ID NO: 907 - DNA, 36 bp, Artificial Sequence
  Description of Artificial Sequence: Synthetic oligonucleotide
gtcgagaccaccgcgaggtctcgcatcgatcgtgcc

SEQ ID NO: 908 - DNA, 36 bp, Artificial Sequence
  Description of Artificial Sequence: Synthetic oligonucleotide
gtctcgattgaatagccatcgagctagcattccggg

SEQ ID NO: 909 - DNA, 34 bp, Artificial Sequence
  Description of Artificial Sequence: Synthetic oligonucleotide
gtcgagattcataaaccatctcgcaggtgtttta

SEQ ID NO: 910 - DNA, 36 bp, Artificial Sequence
  Description of Artificial Sequence: Synthetic oligonucleotide
gtcgggaaccacgctcgttcccgcagaggttgatcc

SEQ ID NO: 911 - DNA, 36 bp, Artificial Sequence
  Description of Artificial Sequence: Synthetic oligonucleotide
gtcgagaccagtgcgaggtctcgcatcgattgctac

SEQ ID NO: 912 - DNA, 36 bp, Artificial Sequence
  Description of Artificial Sequence: Synthetic oligonucleotide
gtcccagctttcaggccgctgggctggcattgtcat

SEQ ID NO: 913 - DNA, 32 bp, Artificial Sequence
  Description of Artificial Sequence: Synthetic oligonucleotide
gttgcatctattcgatgcactgtggtgccgta

SEQ ID NO: 914 - DNA, 31 bp, Artificial Sequence
  Description of Artificial Sequence: Synthetic oligonucleotide
catctattcgatgcactctggtgccgtacac

SEQ ID NO: 915 - DNA, 36 bp, Artificial Sequence
  Description of Artificial Sequence: Synthetic oligonucleotide
gtcgaggacgcaatccgtcctcgcaagcgtgaacac

SEQ ID NO: 916 - DNA, 109 bp, Artificial Sequence
  Description of Artificial Sequence: Synthetic polynucleotide
ccaaccaatgccagcgcgacggcttatgagtcgcgactcgtctgtcgtaaaacaacctttagaatttttttcccaaccaatgccagcgcgacggcttatgagtcgcgac

SEQ ID NO: 917 - DNA, 134 bp, Artificial Sequence
  Description of Artificial Sequence: Synthetic polynucleotide
gaaattaatacgactcactatagggccaaccaatgccagcgcgacggcttatgagtcgcgaccagttcggtgatatacgggatctctttctcaaacaccaaccaatgccagcgcgacggcttatgagtcgcgac

SEQ ID NO: 918 - DNA, 134 bp, Artificial Sequence
  Description of Artificial Sequence: Synthetic polynucleotide
gaaattaatacgactcactatagggccaaccaatgccagcgcgacggcttatgagtcgcgacggtgatatacgggatctctttctcaaacagttttgccaaccaatgccagcgcgacggcttatgagtcgcgac

SEQ ID NO: 919 - DNA, 161 bp, Artificial Sequence
  Description of Artificial Sequence: Synthetic polynucleotide
agaaattaatacgactcactatagggccaaccaatgccagcgcgacggcttatgagtcgcgacaggtgctacatttgaagagataaattgcactgaaaccaaccaatgccagcgcgacggcttatgagtcgcgactaacccctctctaaacggaggggttt

SEQ ID NO: 920 - DNA, 4 bp, Artificial Sequence
  Description of Artificial Sequence: Synthetic oligonucleotide
ratg

SEQ ID NO: 921 - DNA, 4 bp, Artificial Sequence
  Description of Artificial Sequence: Synthetic oligonucleotide
raag

SEQ ID NO: 922 - DNA, 4 bp, Artificial Sequence
  Description of Artificial Sequence: Synthetic oligonucleotide
raar

SEQ ID NO: 923 - DNA, 4 bp, Artificial Sequence
  Description of Artificial Sequence: Synthetic oligonucleotide
raad

What is claimed is:

1. An engineered, non-naturally occurring Clustered Regularly Interspaced Short Palindromic Repeat (CRISPR)—Cas system of CLUST.133120, CLUST.099129, CLUST.342201, CLUST.195009, or CLUST.057059 comprising:
(a) a CRISPR-associated protein or a nucleic acid encoding the CRISPR-associated protein, wherein the CRISPR-associated protein comprises an amino acid sequence that is at least 80% (e.g., 81%, 82%, 83%, 84%, 85%, 86%, 87%, 88%, 89%, 90%, 91%, 92%, 93%, 94%, 95%, 96%, 97%, 98%, 99% or 100%) identical to an amino acid sequence set forth in any one of SEQ ID NOs: 1-50, 101-145, 301-341, 501-521, or 601-682; and
(b) an RNA guide comprising a direct repeat sequence and a spacer sequence capable of hybridizing to a target nucleic acid;
wherein the CRISPR-associated protein is capable of binding to the RNA guide and of modifying the target nucleic acid sequence complementary to the spacer sequence.

2. The system of claim 1, wherein the direct repeat sequence comprises a nucleotide sequence that is at least 80% (e.g., 81%, 82%, 83%, 84%, 85%, 86%, 87%, 88%, 89%, 90%, 91%, 92%, 93%, 94%, 95%, 96%, 97%, 98%, 99% or 100%) identical to a nucleotide sequence set forth in any one of SEQ ID NOs: 51-72, 85-87, 95-100, or 900-915.

3. The system of claim 1 or 2, wherein the CRISPR-associated protein is a protein having at least 80% (e.g., 81%, 82%, 83%, 84%, 85%, 86%, 87%, 88%, 89%, 90%, 91%, 92%, 93%, 94%, 95%, 96%, 97%, 98%, 99% or 100%) identity to an amino acid sequence set forth in SEQ ID NO: 1 or SEQ ID NO: 2.

4. The system of claim 3, wherein the CRISPR-associated protein is capable of recognizing a protospacer adjacent motif (PAM) sequence, wherein the PAM sequence comprises a nucleic acid sequence set forth as 5′-TTN-3′ or 5′-TN-3′.

5. The system of any of the preceding claims, wherein the spacer sequence of the RNA guide comprises between about 15 nucleotides to about 55 nucleotides.

6. The system of any of the preceding claims, wherein the spacer sequence of the RNA guide comprises between 20 and 35 nucleotides.

7. The system of claim 1 or 2, wherein the direct repeat sequence comprises a nucleotide sequence that is at least 80% (e.g., 81%, 82%, 83%, 84%, 85%, 86%, 87%, 88%, 89%, 90%, 91%, 92%, 93%, 94%, 95%, 96%, 97%, 98%, 99% or 100%) identical to a nucleotide sequence set forth in any one of SEQ ID NOs: 146-162.

8. The system of any of claims 1, 2, or 7, wherein the CRISPR-associated protein is a protein having at least 80% (e.g., 81%, 82%, 83%, 84%, 85%, 86%, 87%, 88%, 89%, 90%, 91%, 92%, 93%, 94%, 95%, 96%, 97%, 98%, 99% or 100%) identity to an amino acid sequence set forth in SEQ ID NO: 101, SEQ ID NO: 102, or SEQ ID NO: 103.

9. The system of any of claims 1, 2, 7, or 8, wherein the CRISPR-associated protein is capable of recognizing a protospacer adjacent motif (PAM) sequence, wherein the PAM sequence comprises a nucleic acid sequence set forth as 5′-GTN-3′, 5′-TG-3′, 5′-TR-3′, or 5′-RATG-3′.

10. The system of any of claims 1, 2, or 7-9, wherein the spacer sequence of the RNA guide comprises between about 15 nucleotides to about 55 nucleotides.

11. The system of any of claims 1, 2, or 7-10, wherein the spacer sequence of the RNA guide comprises between 26 and 51 nucleotides.

12. The system of claim 1 or 2, wherein the direct repeat sequence comprises a nucleotide sequence that is at least 80% (e.g., 81%, 82%, 83%, 84%, 85%, 86%, 87%, 88%, 89%, 90%, 91%, 92%, 93%, 94%, 95%, 96%, 97%, 98%, 99% or 100%) identical to a nucleotide sequence set forth in any one of SEQ ID NOs: 342-362.

13. The system of any of claims 1, 2, or 12, wherein the CRISPR-associated protein is a protein having at least 80% (e.g., 81%, 82%, 83%, 84%, 85%, 86%, 87%, 88%, 89%, 90%, 91%, 92%, 93%, 94%, 95%, 96%, 97%, 98%, 99% or 100%) identity to an amino acid sequence set forth in SEQ ID NO: 301.

14. The system of any of claims 1, 2, 12, or 13, wherein the CRISPR-associated protein is capable of recognizing a protospacer adjacent motif (PAM) sequence, wherein the PAM sequence comprises a nucleic acid sequence set forth as 5′-AAG-3′, 5′-AAD-3′, 5′-AAR-3′, 5′-RAAG-3′ (SEQ ID NO: 921), 5′-RAAR-3′ (SEQ ID NO: 922), 5′-RAAD-3′ (SEQ ID NO: 923).

15. The system of any of claims 1, 2, or 12-14, wherein the spacer sequence of the RNA guide comprises between about 12 nucleotides to about 62 nucleotides.

16. The system of claim 15, wherein the spacer sequence of the RNA guide comprises between 19 and 40 nucleotides.

17. The system of claim 1 or 2, wherein the direct repeat sequence comprises a nucleotide sequence that is at least 80% (e.g., 81%, 82%, 83%, 84%, 85%, 86%, 87%, 88%, 89%, 90%, 91%, 92%, 93%, 94%, 95%, 96%, 97%, 98%, 99% or 100%) identical to a nucleotide sequence set forth in any one of SEQ ID NOs: 522-532.

18. The system of claim 1 or 2, wherein the CRISPR-associated protein is a protein having at least 80% (e.g., 81%, 82%, 83%, 84%, 85%, 86%, 87%, 88%, 89%, 90%, 91%, 92%, 93%, 94%, 95%, 96%, 97%, 98%, 99% or 100%) identity to an amino acid sequence set forth in SEQ ID NO: 501.

19. The system of any one of claims 1, 2, or 18, wherein the CRISPR-associated protein is capable of recognizing a protospacer adjacent motif (PAM) sequence, wherein the PAM sequence comprises a nucleic acid sequence set forth as 5′-TTN-3′.

20. The system of any one of claims 1, 2, 18, or 19, wherein the spacer sequence of the RNA guide comprises between about 15 nucleotides to about 55 nucleotides.

21. The system of claim 20, wherein the spacer sequence of the RNA guide comprises between 20 and 39 nucleotides.

22. The system of claim 1 or 2, wherein the direct repeat sequence comprises a nucleotide sequence that is at least 80% (e.g., 81%, 82%, 83%, 84%, 85%, 86%, 87%, 88%, 89%, 90%, 91%, 92%, 93%, 94%, 95%, 96%, 97%, 98%, 99% or 100%) identical to a nucleotide sequence set forth in any one of SEQ ID NOs: 683-734.

23. The system of any one of claims 1, 2, or 22, wherein the CRISPR-associated protein is a protein having at least 80% (e.g., 81%, 82%, 83%, 84%, 85%, 86%, 87%, 88%, 89%, 90%, 91%, 92%, 93%, 94%, 95%, 96%, 97%, 98%, 99% or 100%) identity to an amino acid sequence set forth in SEQ ID NO: 601.

24. The system of any one of claims 1, 2, 22, or 23, wherein the CRISPR-associated protein is capable of recognizing a protospacer adjacent motif (PAM) sequence, wherein the PAM sequence comprises a nucleic acid sequence set forth as 5′-GTN-3′.

25. The system of any one of claims 1, 2, or 22-24, wherein the spacer sequence of the RNA guide comprises between about 15 nucleotides to about 50 nucleotides.

26. The system of claim 25, wherein the spacer sequence of the RNA guide comprises between 20 and 44 nucleotides.

27. The system of any of the preceding claims, wherein the CRISPR-associated protein comprises at least one RuvC domain or at least one split RuvC domain.

28. The system of any of the preceding claims, wherein the CRISPR-associated protein comprises a catalytic residue (e.g., aspartic acid or glutamic acid).

29. The system of any of the preceding claims, wherein the CRISPR-associated protein cleaves the target nucleic acid.

30. The system of any of the preceding claims, wherein the CRISPR-associated protein further comprises a peptide tag, a fluorescent protein, a base-editing domain, a DNA methylation domain, a histone residue modification domain, a localization factor, a transcription modification factor, a light-gated control factor, a chemically inducible factor, or a chromatin visualization factor.

31. The system of any of the preceding claims, wherein the nucleic acid encoding the CRISPR-associated protein is codon-optimized for expression in a cell.

32. The system of any of the preceding claims, wherein the nucleic acid encoding the CRISPR-associated protein is operably linked to a promoter.

33. The system of any of the preceding claims, wherein the nucleic acid encoding the CRISPR-associated protein is in a vector.

34. The system of claim 33, wherein the vector comprises a retroviral vector, a lentiviral vector, a phage vector, an adenoviral vector, an adeno-associated vector, or a herpes simplex vector.

35. The system of any of the preceding claims, wherein the target nucleic acid is a DNA molecule.

36. The system of any of the preceding claims, wherein the target nucleic acid comprises a PAM sequence.

37. The system of any of the preceding claims, wherein the CRISPR-associated protein comprises non-specific nuclease activity.

38. The system of any of the preceding claims, wherein recognition of the target nucleic acid by the CRISPR-associated protein and RNA guide results in a modification of the target nucleic acid.

39. The system of claim 38, wherein the modification of the target nucleic acid is a double-stranded cleavage event.

40. The system of claim 38, wherein the modification of the target nucleic acid is a single-stranded cleavage event.

41. The system of claim 38, wherein the modification of the target nucleic acid results in an insertion event.

42. The system of claim 38, wherein the modification of the target nucleic acid results in a deletion event.

43. The system of any one of claims 38-42, wherein the modification of the target nucleic acid results in cell toxicity or cell death.

44. The system of any of the preceding claims, further comprising a donor template nucleic acid.

45. The system of claim 44, wherein the donor template nucleic acid is a DNA molecule.

46. The system of claim 44, wherein the donor template nucleic acid is an RNA molecule.

47. The system of any of the preceding claims, wherein the system does not comprise a tracrRNA.

48. The system of any of the preceding claims, wherein the CRISPR-associated protein is self-processing.

49. The system of any of the preceding claims, wherein the system is present in a delivery composition comprising a nanoparticle, a liposome, an exosome, a microvesicle, or a gene-gun.

50. The system of any of the preceding claims, within a cell.

51. The system of claim 50, wherein the cell is a eukaryotic cell, e.g., a mammalian cell, e.g., a human cell.

52. The system of claim 50, wherein the cell is a prokaryotic cell.

53. A cell comprising:
(a) a CRISPR-associated protein or a nucleic acid encoding the CRISPR-associated protein, wherein the CRISPR-associated protein comprises an amino acid sequence that is at least 80% (e.g., 81%, 82%, 83%, 84%, 85%, 86%, 87%, 88%, 89%, 90%, 91%, 92%, 93%, 94%, 95%, 96%, 97%, 98%, 99% or 100%) identical to an amino acid sequence set forth in any one of SEQ ID NOs: 1-50; and
(b) an RNA guide comprising a direct repeat sequence and a spacer sequence capable of hybridizing to a target nucleic acid.

54. The cell of claim 53, wherein the CRISPR-associated protein is a protein having at least 80% (e.g., 81%, 82%, 83%, 84%, 85%, 86%, 87%, 88%, 89%, 90%, 91%, 92%, 93%, 94%, 95%, 96%, 97%, 98%, 99% or 100%) identity to an amino acid sequence set forth in SEQ ID NO: 1 or SEQ ID NO: 2.

55. The cell of claim 53 or 54, wherein the CRISPR-associated protein is capable of recognizing a PAM sequence comprising a nucleic acid sequence set forth as 5′-TTN-3′ or 5′-TN-3′.

56. The cell of any of claims 53-55, wherein the direct repeat sequence comprises a nucleotide sequence that is at least 80% (e.g., 81%, 82%, 83%, 84%, 85%, 86%, 87%, 88%, 89%, 90%, 91%, 92%, 93%, 94%, 95%, 96%, 97%, 98%, 99% or 100%) identical to a nucleotide sequence set forth in any one of SEQ ID NOs: 51-72, 85-87, 95-100, or 900-915.

57. The cell of any of claims 53-56, wherein the spacer sequence comprises between about 15 nucleotides to about 55 nucleotides.

58. The cell of any of claims 53-57, wherein the spacer sequence comprises between 20 and 35 nucleotides.

59. A cell comprising:
(a) a CRISPR-associated protein, wherein the CRISPR-associated protein comprises an amino acid sequence that is at least 80% (e.g., 81%, 82%, 83%, 84%, 85%, 86%, 87%, 88%, 89%, 90%, 91%, 92%, 93%, 94%, 95%, 96%, 97%, 98%, 99% or 100%) identical to an amino acid sequence set forth in any one of SEQ ID NOs: 101-145; and
(b) an RNA guide comprising a direct repeat sequence and a spacer sequence capable of hybridizing to a target nucleic acid.

60. The cell of claim 59, wherein the CRISPR-associated protein is a protein having at least 80% (e.g., 81%, 82%, 83%, 84%, 85%, 86%, 87%, 88%, 89%, 90%, 91%, 92%, 93%, 94%, 95%, 96%, 97%, 98%, 99% or 100%) identity to an amino acid sequence set forth in SEQ ID NO: 101, SEQ ID NO: 102, or SEQ ID NO: 103.

61. The cell of claim 59 or 60, wherein the CRISPR-associated protein is capable of recognizing a PAM sequence comprising a nucleic acid sequence set forth as 5′-GTN-3′, 5′-TG-3′, 5′-TR-3′, or 5′-RATG-3′.

62. The cell of any of claims 59-61, wherein the direct repeat sequence comprises a nucleotide sequence that is at least 80% (e.g., 81%, 82%, 83%, 84%, 85%, 86%, 87%, 88%, 89%, 90%, 91%, 92%, 93%, 94%, 95%, 96%, 97%, 98%, 99% or 100%) identical to a nucleotide sequence set forth in any one of SEQ ID NOs: 146-162.

63. The cell of any of claims 59-62, wherein the spacer sequence comprises between about 15 nucleotides to about 55 nucleotides.

64. The cell of any of claims 59-63, wherein the spacer sequence comprises between 26 and 51 nucleotides.

65. A cell comprising:
(a) a CRISPR-associated protein, wherein the CRISPR-associated protein comprises an amino acid sequence that is at least 80% (e.g., 81%, 82%, 83%, 84%, 85%, 86%, 87%, 88%, 89%, 90%, 91%, 92%, 93%, 94%, 95%, 96%, 97%, 98%, 99% or 100%) identical to an amino acid sequence set forth in any one of SEQ ID NOs: 301-341; and
(b) an RNA guide comprising a direct repeat sequence and a spacer sequence capable of hybridizing to a target nucleic acid.

66. The cell of claim 65, wherein the CRISPR-associated protein is a protein having at least 80% (e.g., 81%, 82%, 83%, 84%, 85%, 86%, 87%, 88%, 89%, 90%, 91%, 92%, 93%, 94%, 95%, 96%, 97%, 98%, 99% or 100%) identity to an amino acid sequence set forth in SEQ ID NO: 301.

67. The cell of claim 65 or 66, wherein the CRISPR-associated protein is capable of recognizing a PAM sequence comprising a nucleic acid sequence set forth as 5′-AAG-3′, 5′-AAD-3′, 5′-AAR-3′, 5′-RAAG-3′ (SEQ ID NO: 921), 5′-RAAR-3′ (SEQ ID NO: 922), 5′-RAAD-3′ (SEQ ID NO: 923).

68. The cell of any of claims 65-67, wherein the direct repeat sequence comprises a nucleotide sequence that is at least 80% (e.g., 81%, 82%, 83%, 84%, 85%, 86%, 87%, 88%, 89%, 90%, 91%, 92%, 93%, 94%, 95%, 96%, 97%, 98%, 99% or 100%) identical to a nucleotide sequence set forth in any one of SEQ ID NOs: 342-362.

69. The cell of any of claims 65-68, wherein the spacer sequence comprises between about 12 nucleotides to about 62 nucleotides.

70. The cell of any of claims 65-69, wherein the spacer sequence comprises between 19 and 40 nucleotides.

71. A cell comprising:
(a) a CRISPR-associated protein, wherein the CRISPR-associated protein comprises an amino acid sequence that is at least 80% (e.g., 81%, 82%, 83%, 84%, 85%, 86%, 87%, 88%, 89%, 90%, 91%, 92%, 93%, 94%, 95%, 96%, 97%, 98%, 99% or 100%) identical to an amino acid sequence set forth in any one of SEQ ID NOs: 501-521; and
(b) an RNA guide comprising a direct repeat sequence and a spacer sequence capable of hybridizing to a target nucleic acid.

72. The cell of claim 71, wherein the CRISPR-associated protein is a protein having at least 80% (e.g., 81%, 82%, 83%, 84%, 85%, 86%, 87%, 88%, 89%, 90%, 91%, 92%, 93%, 94%, 95%, 96%, 97%, 98%, 99% or 100%) identity to an amino acid sequence set forth in SEQ ID NO: 501.

73. The cell of claim 71 or 72, wherein the CRISPR-associated protein is capable of recognizing a PAM sequence comprising a nucleic acid sequence set forth as 5′-TTN-3′.

74. The cell of any of claims 71-73, wherein the direct repeat sequence comprises a nucleotide sequence that is at least 80% (e.g., 81%, 82%, 83%, 84%, 85%, 86%, 87%, 88%, 89%, 90%, 91%, 92%, 93%, 94%, 95%, 96%, 97%, 98%, 99% or 100%) identical to a nucleotide sequence set forth in any one of SEQ ID NOs: 522-532.

75. The cell of any of claims 71-74, wherein the spacer sequence comprises between about 15 nucleotides to about 55 nucleotides.

76. The cell of any of claims 71-75, wherein the spacer sequence comprises between 20 and 39 nucleotides.

77. A cell comprising:
(a) a CRISPR-associated protein, wherein the CRISPR-associated protein comprises an amino acid sequence that is at least 80% (e.g., 81%, 82%, 83%, 84%, 85%, 86%, 87%, 88%, 89%, 90%, 91%, 92%, 93%, 94%, 95%, 96%, 97%, 98%, 99% or 100%) identical to an amino acid sequence set forth in any one of SEQ ID NOs: 601-682; and
(b) an RNA guide comprising a direct repeat sequence and a spacer sequence capable of hybridizing to a target nucleic acid.

78. The cell of claim 77, wherein the CRISPR-associated protein is a protein having at least 80% (e.g., 81%, 82%, 83%, 84%, 85%, 86%, 87%, 88%, 89%, 90%, 91%, 92%, 93%, 94%, 95%, 96%, 97%, 98%, 99% or 100%) identity to an amino acid sequence set forth in SEQ ID NO: 601.

79. The cell of claim 77 or 78, wherein the CRISPR-associated protein is capable of recognizing a PAM sequence comprising a nucleic acid sequence set forth as 5′-GTN-3′.

80. The cell of any of claims 77-79, wherein the direct repeat sequence comprises a nucleotide sequence that is at least 80% (e.g., 81%, 82%, 83%, 84%, 85%, 86%, 87%, 88%, 89%, 90%, 91%, 92%, 93%, 94%, 95%, 96%, 97%, 98%, 99% or 100%) identical to a nucleotide sequence set forth in any one of SEQ ID NOs: 683-734.

81. The cell of any of claims 77-80, wherein the spacer sequence comprises between about 15 nucleotides to about 50 nucleotides.

82. The cell of any of claims 77-81, wherein the spacer sequence comprises between 20 and 44 nucleotides.

83. The cell of any one of claims 53-82, wherein the cell does not comprise a tracrRNA.

84. The cell of any one of claims 53-83, wherein the cell is a eukaryotic cell, e.g., a mammalian cell, e.g., a human cell.

85. The cell of any one of claims 53-83, wherein the cell is a prokaryotic cell.

86. A method of modifying a target nucleic acid, the method comprising delivering to the target nucleic acid an engineered, non-naturally occurring CRISPR-Cas system comprising:
(a) a CRISPR-associated protein or a nucleic acid encoding the CRISPR-associated protein, wherein the CRISPR-associated protein comprises an amino acid sequence that is at least 80% (e.g., 81%, 82%, 83%, 84%, 85%, 86%, 87%, 88%, 89%, 90%, 91%, 92%, 93%, 94%, 95%, 96%, 97%, 98%, 99% or 100%) identical to an amino acid sequence set forth in any one of SEQ ID NOs: 1-50; and
(b) an RNA guide comprising a direct repeat sequence and a spacer sequence capable of hybridizing to the target nucleic acid;
wherein the CRISPR-associated protein is capable of binding to the RNA guide; and
wherein recognition of the target nucleic acid by the CRISPR-associated protein and RNA guide results in a modification of the target nucleic acid.

87. The method of claim 86, wherein the CRISPR-associated protein is a protein having at least 80% (e.g., 81%, 82%, 83%, 84%, 85%, 86%, 87%, 88%, 89%, 90%, 91%, 92%, 93%, 94%, 95%, 96%, 97%, 98%, 99% or 100%) identity to an amino acid sequence set forth in SEQ ID NO: 1 or SEQ ID NO: 2.

88. The method of claim 86 or 87, wherein the CRISPR-associated protein is capable of recognizing a PAM sequence comprising a nucleic acid sequence set forth as 5′-TTN-3′ or 5′-TN-3′.

89. The method of any of claims 86-88, wherein the direct repeat sequence comprises a nucleotide sequence that is at least 80% (e.g., 81%, 82%, 83%, 84%, 85%, 86%, 87%, 88%, 89%, 90%, 91%, 92%, 93%, 94%, 95%, 96%, 97%, 98%, 99% or 100%) identical to a nucleotide sequence set forth in any one of SEQ ID NOs: 51-72, 85-87, 95-100, or 900-915.

90. The method of any of claims 86-89, wherein the spacer sequence comprises between about 15 nucleotides to about 55 nucleotides.

91. The method of any of claims 86-90, wherein the spacer sequence comprises between 20 and 35 nucleotides.

92. A method of modifying a target nucleic acid, the method comprising delivering to the target nucleic acid an engineered, non-naturally occurring CRISPR-Cas system comprising:
(a) a CRISPR-associated protein, wherein the CRISPR-associated protein comprises an amino acid sequence that is at least 80% (e.g., 81%, 82%, 83%, 84%, 85%, 86%, 87%, 88%, 89%, 90%, 91%, 92%, 93%, 94%, 95%, 96%, 97%, 98%, 99% or 100%) identical to an amino acid sequence set forth in any one of SEQ ID NOs: 101-145; and
(b) an RNA guide comprising a direct repeat sequence and a spacer sequence capable of hybridizing to the target nucleic acid;
wherein the CRISPR-associated protein is capable of binding to the RNA guide; and
wherein recognition of the target nucleic acid by the CRISPR-associated protein and RNA guide results in a modification of the target nucleic acid.

93. The method of claim 92, wherein the CRISPR-associated protein is a protein having at least 80% (e.g., 81%, 82%, 83%, 84%, 85%, 86%, 87%, 88%, 89%, 90%, 91%, 92%, 93%, 94%, 95%, 96%, 97%, 98%, 99% or 100%) identity to an amino acid sequence set forth in SEQ ID NO: 101, SEQ ID NO: 102, or SEQ ID NO: 103.

94. The method of claim 92 or 93, wherein the CRISPR-associated protein is capable of recognizing a PAM sequence comprising a nucleic acid sequence set forth as 5′-GTN-3′, 5′-TG-3′, 5′-TR-3′, or 5′-RATG-3′.

95. The method of any of claims 92-94, wherein the direct repeat sequence comprises a nucleotide sequence that is at least 80% (e.g., 81%, 82%, 83%, 84%, 85%, 86%, 87%, 88%, 89%, 90%, 91%, 92%, 93%, 94%, 95%, 96%, 97%, 98%, 99% or 100%) identical to a nucleotide sequence set forth in any one of SEQ ID NOs: 146-162.

96. The method of any of claims 92-95, wherein the spacer sequence comprises between about 15 nucleotides to about 55 nucleotides.

97. The method of any of claims 92-96, wherein the spacer sequence comprises between 26 and 51 nucleotides.

98. A method of modifying a target nucleic acid, the method comprising delivering to the target nucleic acid an engineered, non-naturally occurring CRISPR-Cas system comprising:
(a) a CRISPR-associated protein, wherein the CRISPR-associated protein comprises an amino acid sequence that is at least 80% (e.g., 81%, 82%, 83%, 84%, 85%, 86%, 87%, 88%, 89%, 90%, 91%, 92%, 93%, 94%, 95%, 96%, 97%, 98%, 99% or 100%) identical to an amino acid sequence set forth in any one of SEQ ID NOs: 301-341; and
(b) an RNA guide comprising a direct repeat sequence and a spacer sequence capable of hybridizing to the target nucleic acid;
wherein the CRISPR-associated protein is capable of binding to the RNA guide; and
wherein recognition of the target nucleic acid by the CRISPR-associated protein and RNA guide results in a modification of the target nucleic acid.

99. The method of claim 98, wherein the CRISPR-associated protein is a protein having at least 80% (e.g., 81%, 82%, 83%, 84%, 85%, 86%, 87%, 88%, 89%, 90%, 91%, 92%, 93%, 94%, 95%, 96%, 97%, 98%, 99% or 100%) identity to an amino acid sequence set forth in SEQ ID NO: 301.

100. The method of claim 98 or 99, wherein the CRISPR-associated protein is capable of recognizing a PAM sequence comprising a nucleic acid sequence set forth as 5′-AAG-3′, 5′-AAD-3′, 5′-AAR-3′, 5′-RAAG-3′ (SEQ ID NO: 921), 5′-RAAR-3′ (SEQ ID NO: 922), 5′-RAAD-3′ (SEQ ID NO: 923).

101. The method of any of claims 98-100, wherein the direct repeat sequence comprises a nucleotide sequence that is at least 80% (e.g., 81%, 82%, 83%, 84%, 85%, 86%, 87%, 88%, 89%, 90%, 91%, 92%, 93%, 94%, 95%, 96%, 97%, 98%, 99% or 100%) identical to a nucleotide sequence set forth in any one of SEQ ID NOs: 342-362.

102. The method of any of claims 98-101, wherein the spacer sequence comprises between about 12 nucleotides to about 62 nucleotides.

103. The method of any of claims 98-102, wherein the spacer sequence comprises between 19 and 40 nucleotides.

104. A method of modifying a target nucleic acid, the method comprising delivering to the target nucleic acid an engineered, non-naturally occurring CRISPR-Cas system comprising:
(a) a CRISPR-associated protein, wherein the CRISPR-associated protein comprises an amino acid sequence that is at least 80% (e.g., 81%, 82%, 83%, 84%, 85%, 86%, 87%, 88%, 89%, 90%, 91%, 92%, 93%, 94%, 95%, 96%, 97%, 98%, 99% or 100%) identical to an amino acid sequence set forth in any one of SEQ ID NOs: 501-521; and
(b) an RNA guide comprising a direct repeat sequence and a spacer sequence capable of hybridizing to the target nucleic acid;
wherein the CRISPR-associated protein is capable of binding to the RNA guide; and
wherein recognition of the target nucleic acid by the CRISPR-associated protein and RNA guide results in a modification of the target nucleic acid.

105. The method of claim 104, wherein the CRISPR-associated protein is a protein having at least 80% (e.g., 81%, 82%, 83%, 84%, 85%, 86%, 87%, 88%, 89%, 90%, 91%, 92%, 93%, 94%, 95%, 96%, 97%, 98%, 99% or 100%) identity to an amino acid sequence set forth in SEQ ID NO: 501.

106. The method of claim 104 or 105, wherein the CRISPR-associated protein is capable of recognizing a PAM sequence comprising a nucleic acid sequence set forth as 5′-TTN-3′.

107. The method of any of claims 104-106, wherein the direct repeat sequence comprises a nucleotide sequence that is at least 80% (e.g., 81%, 82%, 83%, 84%, 85%, 86%, 87%, 88%, 89%, 90%, 91%, 92%, 93%, 94%, 95%, 96%, 97%, 98%, 99% or 100%) identical to a nucleotide sequence set forth in any one of SEQ ID NOs: 522-532.

108. The method of any of claims 104-107, wherein the spacer sequence comprises between about 15 nucleotides to about 55 nucleotides.

109. The method of any of claims 104-108, wherein the spacer sequence comprises between 20 and 39 nucleotides.

110. A method of modifying a target nucleic acid, the method comprising delivering to the target nucleic acid an engineered, non-naturally occurring CRISPR-Cas system comprising:
(a) a CRISPR-associated protein, wherein the CRISPR-associated protein comprises an amino acid sequence that is at least 80% (e.g., 81%, 82%, 83%, 84%, 85%, 86%, 87%, 88%, 89%, 90%, 91%, 92%, 93%, 94%, 95%, 96%, 97%, 98%, 99% or 100%) identical to an amino acid sequence set forth in any one of SEQ ID NOs: 601-682; and
(b) an RNA guide comprising a direct repeat sequence and a spacer sequence capable of hybridizing to the target nucleic acid;
wherein the CRISPR-associated protein is capable of binding to the RNA guide; and
wherein recognition of the target nucleic acid by the CRISPR-associated protein and RNA guide results in a modification of the target nucleic acid.

111. The method of claim 110, wherein the CRISPR-associated protein is a protein having at least 80% (e.g., 81%, 82%, 83%, 84%, 85%, 86%, 87%, 88%, 89%, 90%, 91%, 92%, 93%, 94%, 95%, 96%, 97%, 98%, 99% or 100%) identity to an amino acid sequence set forth in SEQ ID NO: 601.

112. The method of claim 110 or 111, wherein the CRISPR-associated protein is capable of recognizing a PAM sequence comprising a nucleic acid sequence set forth as 5′-GTN-3′.

113. The method of any of claims 110-112, wherein the direct repeat sequence comprises a nucleotide sequence that is at least 80% (e.g., 81%, 82%, 83%, 84%, 85%, 86%, 87%, 88%, 89%, 90%, 91%, 92%, 93%, 94%, 95%, 96%, 97%, 98%, 99% or 100%) identical to a nucleotide sequence set forth in any one of SEQ ID NOs: 683-734.

114. The method of any of claims 110-113, wherein the spacer sequence comprises between about 15 nucleotides to about 50 nucleotides.

115. The method of any of claims 110-114, wherein the spacer sequence comprises between 20 and 44 nucleotides.

116. A method of binding the system of any one of claims 1-49 to a target nucleic acid in a cell comprising:
(a) providing the system; and
(b) delivering the system to the cell,
wherein the cell comprises the target nucleic acid, wherein the CRISPR-associated protein binds to the RNA guide, and wherein the spacer sequence binds to the target nucleic acid.

117. The method of claim 116, wherein the cell is a eukaryotic cell, e.g., a mammalian cell, e.g., a human cell.

118. The method of any one of claims 86-117, wherein the system does not comprise a tracrRNA.

119. The method of any one of claims 86-118, wherein the target nucleic acid is a DNA molecule.

120. The method of any one of claims 88-119, wherein the target nucleic acid comprises a PAM sequence.

121. The method of any one of claims 88-120, wherein the CRISPR-associated protein comprises non-specific nuclease activity.

122. The method of any one of claims 88-121, wherein the modification of the target nucleic acid is a double-stranded cleavage event.

123. The method of any one of claims 88-121, wherein the modification of the target nucleic acid is a single-stranded cleavage event.

124. The method of any one of claims 88-121, wherein the modification of the target nucleic acid results in an insertion event.

125. The method of any one of claims 88-121, wherein the modification of the target nucleic acid results in a deletion event.

126. The method of any one of claims 122-125, wherein the modification of the target nucleic acid results in cell toxicity or cell death.

127. A method of editing a target nucleic acid, the method comprising contacting the target nucleic acid with the system of any one of claims 1-49.

128. A method of modifying expression of a target nucleic acid, the method comprising contacting the target nucleic acid with a system of any one of claims 1-49.

129. A method of targeting the insertion of a payload nucleic acid at a site of a target nucleic acid, the method comprising contacting the target nucleic acid with a system of any one of claims 1-49.

130. A method of targeting the excision of a payload nucleic acid from a site at a target nucleic acid, the method comprising contacting the target nucleic acid with a system of any one of claims 1-49.

131. A method of non-specifically degrading single-stranded DNA upon recognition of a DNA target nucleic acid, the method comprising contacting the target nucleic acid with a system of any one of claims 1-49.

132. A method of detecting a target nucleic acid in a sample, the method comprising:
(a) contacting the sample with the system of any one of claims 1-49 and a labeled reporter nucleic acid, wherein hybridization of the spacer sequence to the target nucleic acid causes cleavage of the labeled reporter nucleic acid; and
(b) measuring a detectable signal produced by cleavage of the labeled reporter nucleic acid, thereby detecting the presence of the target nucleic acid in the sample.

133. Use of the system of any one of claims 1-49 in an in vitro or ex vivo method of:
(a) targeting and editing a target nucleic acid;
(b) non-specifically degrading a single-stranded nucleic acid upon recognition of the nucleic acid;
(c) targeting and nicking a non-spacer complementary strand of a double-stranded target upon recognition of a spacer complementary strand of the double-stranded target;
(d) targeting and cleaving a double-stranded target nucleic acid;
(e) detecting a target nucleic acid in a sample;
(f) specifically editing a double-stranded nucleic acid;
(g) base editing a double-stranded nucleic acid;
(h) inducing genotype-specific or transcriptional-state-specific cell death or dormancy in a cell;
(i) creating an indel in a double-stranded nucleic acid target;
(j) inserting a sequence into a double-stranded nucleic acid target; or
(k) deleting or inverting a sequence in a double-stranded nucleic acid target.

134. A method of introducing an insertion or deletion into a target nucleic acid in a mammalian cell, comprising a transfection of:
(a) a nucleic acid sequence encoding a CRISPR-associated protein, wherein the CRISPR-associated protein comprises an amino acid sequence that is at least 80% (e.g., 81%, 82%, 83%, 84%, 85%, 86%, 87%, 88%, 89%, 90%, 91%, 92%, 93%, 94%, 95%, 96%, 97%, 98%, 99% or 100%) identical to an amino acid sequence set forth in any one of SEQ ID NOs: 1-50, 101-145, 301-341, 501-521, or 601-682; and
(b) an RNA guide (or a nucleic acid encoding the RNA guide) comprising a direct repeat sequence and a spacer sequence capable of hybridizing to the target nucleic acid;
wherein the CRISPR-associated protein is capable of binding to the RNA guide; and
wherein recognition of the target nucleic acid by the CRISPR-associated protein and RNA guide results in a modification of the target nucleic acid.

135. The method of claim 134, wherein the CRISPR-associated protein comprises an amino acid sequence that is at least 80% (e.g., 81%, 82%, 83%, 84%, 85%, 86%, 87%, 88%, 89%, 90%, 91%, 92%, 93%, 94%, 95%, 96%, 97%, 98%, 99% or 100%) identical to an amino acid sequence set forth in any one of SEQ ID NOs: 1, 101, 301, 501, or 601.

136. The method of claim 134, wherein the CRISPR-associated protein comprises an amino acid sequence of one of any one of SEQ ID NOs: 1, 101, 301, 501, or 601.

137. The method of any of claims 134-136, wherein the transfection is a transient transfection.

138. The method of any of claims 134-137, wherein the cell is a human cell.
